(19) United States
(12) Patent Application Publication
(10) Pub. No.: US 2012/0184019 A1
(43) Pub. Date: Jul. 19, 2012

(54) STABLE PLASMID EXPRESSION VECTOR FOR BACTERIA

(75) Inventors: Joe Pogliano, San Diego, CA (US); Alan Derman, San Diego, CA (US)

(73) Assignee: The Regents of the University of California, Oakland, CA (US)

(21) Appl. No.: 13/378,516

(22) PCT Filed: Jun. 16, 2010
(86) PCT No.: PCT/US10/38892

§ 371 Date: Mar. 1, 2012

Related U.S. Application Data
(60) Provisional application No. 61/187,592, filed on Jun. 16, 2009.

(51) Int. Cl. C12N 15/63; C12N 1/21

(52) U.S. Cl. 435/252.31; 435/320.1; 435/252.33

(57) ABSTRACT

The invention provides compositions and methods for stable plasmid maintenance and protein expression in bacteria. Further provided are compositions and methods for promoting competence in bacteria that are otherwise not transformable.

### CROSS-REFERENCES TO RELATED APPLICATIONS

[0001] This application claims priority to U.S. Provisional Application 61/187,592, filed Jun. 16, 2009, the disclosure of which is incorporated by reference herein in its entirety.

### STATEMENT AS TO RIGHTS TO INVENTIONS MADE UNDER FEDERALLY SPONSORED RESEARCH OR DEVELOPMENT

[0002] Embodiments of this invention were made with Government support under grant number GM073898, awarded by the National Institutes of Health. The Government has certain rights in this invention.

### BACKGROUND OF THE INVENTION

[0003] The worldwide market for proteins produced from recombinant bacteria covers many business sectors beyond biotechnology and medine. The market for enzymes produced by strains of Bacillus alone is estimated to be greater than $1 billion, especially for high-level production of cellulases used to produce biofuels or for other industrial processes. The system is used for high level expression of commercially important proteins; constructing and screening libraries of genes; and complementing bacterial chromosomal mutations. In addition, many strains of Bacillus are sold by the ton commercially for agricultural use because of the their ability to produce secondary metabolites that simultaneously promote plant growth and suppress disease. However, nearly all of these commercially important strains cannot be easily manipulated genetically.

[0004] Expression in Bacillus has generally been achieved through gene integration into the bacterial chromosome at a specific site. The drawback of this is that there is only one copy per cell, and expression is not very high. Also, it is difficult to retrieve the gene from the chromosome for additional manipulations. To avoid these issues, several different types of B. subtilis plasmids that have been used, such as pUB110, pE194, pMTLBS72, or pSMbeta1. However, these plasmids are unstable and do not segregate well during cell growth, making them relatively difficult to use for gene expression. During large scale fermentation without antibiotic selection, a significant number of cells (50-99.9%) lose the plasmids. Even under selection, the bacteria may lose their plasmids unless they have this stable segregation system.

[0005] Actin, one of the most abundant proteins in the eukaryotic cell, has an abundance of relatives in the eukaryotic proteome. To date though, only five families of actins have been characterized in bacteria.

[0006] Actin is present in all eukaryotic cells and is the most abundant protein of the eukaryotic cytoskeleton. Actin participates in such fundamental processes as cell motility, endocytosis, cell remodeling, cytokinesis, and transcription (Le Clainche et al., Physiol Rev 88:489-513 (2008); Pollard et al., Cell 112:453-465 (2003); Girao et al., FEBS Lett 582:2112-2119 (2008); Wanner et al., J Cell Sci 120:2641-2651 (2007); Pollard Biochem Soc Trans 36:425-430 (2008); Chen et al., Curr Opin Cell Biol 19:326-330 (2007)). Actin is extremely well conserved. The cytoskeletal actins of chicken, cow, and man are identical to each other across all 375 amino acids of the protein. The actin of Saccharomyces cerevisiae is exactly the same length, and its sequence is 89% identical to this vertebrate sequence.

[0007] This level of sequence conservation is not required for the actin fold. Actin is a member of a large superfamily of proteins that share the same fundamental architecture. In this superfamily are the 70-kDa heat shock proteins and a group of sugar and sugar alcohol kinases that includes hexokinase and glycerol kinase (Kabsch et al., FASEB J 9:167-174 (1995); Flaherty et al., Proc Natl Acad Sci USA 88:5041-5045 (1991); Bork et al., Proc Natl Acad Sci USA 89:7290-7294 (1992)). The actin folds of rabbit skeletal muscle actin and the 70-kDa heat shock protein from cow, two members of this superfamily, are only 16% identical at the amino acid sequence level, but can be superimposed with a root mean square deviation of 2.3 Å (Flaherty et al., Proc Natl Acad Sci USA 88:5041-5045 (1991)).

[0008] Long assumed to lack a cytoskeleton or cytoskeletal proteins, bacteria have in the last decade been shown to contain homologs of actin and also of tubulin and intermediate filaments (Pogliano Curr Opin Cell Biol 20:19-27 (2008); Graumann Annu Rev Microbiol 61:589-618 (2007). To date five distinct families of actin-like proteins have been identified in bacteria, and they are no more related to each other than they are to actin (<13% sequence identity). The crystal structures of members of three of these families, of FtsA, MreB, and ParM, confirmed that their classification as members of the actin family was appropriate despite the very slight resemblance of their sequences to that of actin (van den Ent et al., EMBO J. 19(20):5300-5307 (2000); van den Ent et al., Nature 413:39-44 (2001); van den Ent et al., EMBO J21:6935-6943 (2002)).

[0009] MreB is found in many non-spherical bacteria and is required for the generation of proper cell shape (Daniel et al., Cell 113:767-776 (2003); Carballido-López et al., Curr Opin Microbiol 10:611-616 (2007); Osborn et al. Curr Opin Microbiol 10:606-610 (2007)). In Bacillus subtilis, Escherichia coli, and Caulobacter crescentus, helical filaments of MreB coil through the length of the cell at the cytoplasmic membrane (Jones et al., Cell 104:913-922 (2001); Shih et al., Proc Natl Acad Sci USA 100:7865-7870 (2003); Gitai et al., Proc Natl Acad Sci 101:8643-8648 (2004); Figge et al., Mol Microbiol 51:1321-1332 (2004)). The filaments are dynamic, moving in a treadmilling-like fashion (Soufo et al., EMBO Reps 5:789-794 (2004); Kim et al., Proc Natl Acad USA 103:10929-10934 (2006)). FtsA is a component of the bacterial cell division machinery that interacts directly with the machinery's principal component, the tubulin relative FtsZ (Shiomi et al., Mol Microbiol 66:1396-1415 (2007); Pichoff et al., Mol Microbiol 55:1722-1734 (2005)). MamK is present in magnetotactic bacteria and is required for organization into linear chains of the cytoplasmic membrane invaginations that contain magnetic nanocrystals. MamK is assembled into several filaments that flank these chains. In the absence of MamK, the invaginations are disordered and scattered (Komeili et al., Science 311:242-245 (2006); Schüler FEMS Microbiol Rev 32:654-672 (2008)).

[0010] ParM and AlfA are each nucleotide-binding components of plasmid partitioning systems. Both form dynamic filaments within the cell, and the dynamic properties of the filaments are required for partitioning (Møller-Jensen et al., EMBO J 21:3119-3127 (2002); Møller-Jensen et al., Mol Cell 12:1477-1487 (2003); Campbell et al., J Cell Biol 179:1059-1066 (2007); Becker et al., EMBO J 25:5919-5931 (2006)). The purified ParM is able to polymerize spontaneously in the presence of ATP into filaments that display dynamic instability (Garner et al., Science 306:1021-1025 (2004); Garner et al., Science 315:1270-1274 (2007)). Plasmids are found at the end of ParM filaments both within the cell and in in vitro reconstructions of the system, which is consistent with a mechanism in which plasmids are pushed towards the cell poles (Gerdes et al., Cell 116:359-366 (2004); Møller-Jensen et al., EMBO J 21:3119-3127 (2002); Møller-Jensen et al., Mol Cell 12:1477-1487 (2003); Campbell et al., J Cell Biol 179:1059-1066 (2007); Garner et al., Science 315:1270-1274 (2007); Garner et al., Science 306:1021-1025 (2004); Salje et al., Science 323:509-512 (2009)). Reconstructions from cryo-electron microscopy indicate that ParM filaments and actin filaments are constructed very differently. The monomer interfaces are different, and as a consequence, ParM and actin filaments are of the opposite helical handedness (Orlova et al., Nat Struct Mol Biol 14:921-926 (2007); Popp et al., EMBO J 27:570-579 (2008)).

[0011] With a mere five families of distant relatives identified, actin would appear to have only very sparse representation in bacteria. There are in contrast a great number of actin relatives that have been identified in eukaryotes, and even among these eukaryotic proteins there is considerable sequence and functional diversity. The actin-related proteins, or ARPs were discovered about twenty years ago. Although there exist structures for only Arp2 and Arp3, the secondary structural elements of the actin fold appear to be present in all of the ARPs (Muller et al., Mol Biol Cell 16:5736-5748 (2005)). Arp1, a component of the dynein activator complex, is the closest to actin in amino acid sequence; the sequences of Saccharomyces cerevisiae Arp1 and actin are 46% identical. Arp1 retains the signature property of actin: Arp1 polymerizes into filaments with the pitch of filamentous actin. Arp1 also binds ATP, and filament formation, as in actin, is accompanied by ATP hydrolysis. There are, however, differences. Kinetic profiles indicate that there is no barrier to nucleation and that the Arp1 filaments cannot be extended beyond a specific length (Bingham et al., Curr Biol 9:223-226 (1999)). The divergence is greater for Arp2 and Arp3, which in Saccharomyces are respectively 39% and 32% identical to actin. Their crystal structures, which were solved in the context of the bovine Arp2/3 complex, revealed that the actin fold is well preserved in both proteins (Robinson et al., Science 294:1679-1684 (2001); Nolen et al., Proc Natl Acad Sci USA 101:15627-15632 (2004)). But neither protein homopolymerizes into filaments, each binds ATP with three orders of magnitude lower affinity than actin does, and Arp3 does not appear to hydrolyze ATP at all (Dayel et al., Proc Natl Acad Sci USA 98:14871-14876 (2001); Dayel et al., PLoS Biol 2:0476-0485 (2004)). The remaining ARPs diverge still further from actin. The sequences of Saccharomyces Arp9 and actin, for example, share only 14% identity, on the order of the bacterial actins.

[0012] A recent survey of a single eukaryotic genome, Dictyostelium discoideum, turned up 16 genes that code for proteins that closely resemble actin, as well as eight ARPs, in addition to 17 copies of the actin gene, (Joseph et al., PLoS ONE 3:e2654 (2008)).

[0013] Genetic competence is the ability of a bacterial cell to take up exogenous DNA and is key to the genetic manipulation of bacteria. In a few strains of Bacillus, such as B. subtilis strain 168, genetic competence can be induced easily, and comes about when the corn genes, which encode the DNA uptake machinery are expressed during stationary phase by the transcription factor ComK. In contrast to strain 168, the vast majority of Bacillus strains of commercial importance cannot be readily made competent despite the fact that they contain the same corn genes. The inability to activate competence severely limits the ability to manipulate these strains genetically.

[0014] In the commonly used laboratory strain Bacillus subtilis 168, competence requires the expression of a set of corn genes whose products assemble into a complex in the inner membrane that actively translocates DNA into the cell. Expression of the corn genes is under the control of the transcription factor ComK, and cells become competent when ComK accumulates in the cells. Many strains of Bacillus contain all of the corn genes necessary for competence, but do not express them. Expression of the B. subtilis ComK protein in these untransformable strains is sufficient to make them competent, but because these strains are untransformable, it is difficult if not impossible, to introduce a ComK expression plasmid into these strains.

[0015] The present invention provides additional bacterial proteins that share structural and functional characteristics with actin. The invention thus provides a number of bacterial Actin-like proteins (ALPs). The ALPs can be used to confer stable segregation of any self-replicating DNA molecule (e.g., a plasmid or other expression vector) through multiple generations.

[0016] The invention overcomes the longtime limitations associated with protein expression in bacteria, and offers the ability to manipulate many different species of Bacillus. The ability to genetically manipulate these strains will allow their products to be produced at higher yields with increased safety and at reduced costs. The invention further provides an expression vector that is capable of being delivered directly into strains of Bacillus and activating the competence pathway. This general system will allow many species of Bacillus of industrial importance to be easily manipulated genetically.

[0017] The invention provides for the first time a plasmid vector that is stably inherited in Bacillus bacterial strains in the absence of antibiotic selection. The vector can be used without further development to produce heterologous proteins in bacteria. The ALPs can be used in such methods. Further included is a system for genetic competence, i.e., the ability to take up exogenous DNA, that is stably inherited.

### BRIEF SUMMARY OF THE INVENTION

[0018] The invention provides a plasmid stability system that is functional in multiple bacterial species, including e.g., Bacillus such as B. subtilis. The stability system makes expression vectors significantly more stable in bacteria than in the absence of the stability system, so that the expression vector will be maintained through multiple generations (passages, divisions) of bacteria, e.g., more than 5, 10, 20, 25, 30, 35, 40, 50, or more generations. The stability system plasmid contains a novel type of DNA segregation system that segregates newly replicated plasmids prior to cell division, even without antibiotic selection. The plasmids are then maintained in the bacteria, e.g., E. coli and B. subtilis.

[0019] The invention thus provides a bacterial plasmid vector that causes the plasmid to be stably maintained in multiple species and strains of bacteria. The invention also provides plasmid vectors comprising such a sequence, optionally in combination with at least one heterologous sequence, e.g., encoding a commercially valuable heterologous protein. The invention also provides a method of expression, wherein a heterologous protein can be stably expressed in bacteria, such as a B. subtilis strain. Stable expression from a B. subtilis plasmid vector was not achievable before the present invention.

[0020] In some embodiments, the system comprises a vector encoding an actin-like polymer and a DNA binding protein. In some embodiments, the actin polymer is selected from one of the actin sequences (ALPs) disclosed herein.

[0021] The invention provides an isolated plasmid expression vector comprising a polynucleotide encoding a prokaryote-derived actin like protein (ALP), wherein the vector comprises a stability system. In some embodiments, the vector comprises an ALP operon from a prokaryotic mobile genetic element. In some embodiments, the ALP has at least 90% identity to a polypeptide sequence selected from the group consisting of SEQ ID NOs:1-409. In some embodiments, the ALP has at least 95%, 96%, 97%, 98%, or 99% identity to a polypeptide sequence selected from the group consisting of SEQ ID NOs:1-409. In some embodiments, the ALP further comprises a polypeptide sequence having at least 90% identity to SEQ ID NO:411.

[0022] In some embodiments, the vector encodes an ALP7 stability system comprising an ALP7. In some embodiments, the ALP7 has at least 90% identity to a polypeptide sequence selected from the group consisting of SEQ ID NOs:1-14, or at least 90% identity to the polypeptide sequence of SEQ ID NO:1. In some embodiments, the ALP has at least 95%, 96%, 97%, 98%, or 99% identity to a polypeptide sequence selected from the group consisting of SEQ ID NOs:1-14. In some embodiments, the ALP is selected from the group consisting of SEQ ID NOs: 1-14. In some embodiments, the ALP In some embodiments, the ALP further comprises a polypeptide sequence having at least 90% identity to SEQ ID NO:411. In some embodiments, the vector comprises the polynucleotide sequence of SEQ ID NO:410. In some embodiments, the ALP comprises: D at the residue corresponding to human beta actin residue 11, G at the residue corresponding to human beta actin residue 13, E or Q at the residue corresponding to human beta actin residue 137, D at the residue corresponding to human beta actin residue154, and G at the residue corresponding to human beta actin residue156, when optimally aligned with the polypeptide sequence of human beta actin.

[0023] In some embodiments, the vector further comprises a polynucleotide encoding a heterologous polypeptide. In some embodiments, the heterologous polypeptide is a commercially important product, e.g., a cellulase, an enzyme, a drug, or a molecular biology tool. In some embodiments, the heterologous polypeptide is comK. One of skill will recognize that more than one coding sequence can be added to the vector, so that multiple heterologous polypeptides are produced. For example, in some embodiments, the vector comprises a coding sequence for each of the com protein components. In some embodiments, the vector comprises comK and an additional heterologous polypeptide. In some embodiments, the polynucleotide encoding the heterolgous polypeptide is included on a different expression vector than the ALP coding sequence.

[0024] In some embodiments, the invention provides an isolated bacteria comprising the stability system as described herein. In some embodiments, the isolated bacteria includes a plasmid expression vector that encodes an ALP as described above, e.g., comprising a polypeptide having at least 90% identity to a sequence selected from the group consisting of SEQ ID NOs:1-409. The bacteria can be from any species or strain, e.g., Bacillus or Escherichia. Exemplary strains of Bacillus include B. subtilis, B. megaterium, B. amyloliquefaceins, B. thuringiensis, B. licheniformis, B. sphericus, B. anthracis, B. cereus and all other related Bacillus species.

[0025] In some embodiments, the invention provides methods for stable expression of a heterologous polypeptide using a stability system as described herein. In some embodiments, the method comprises introducing an expression vector encoding an ALP, e.g., an ALP7, and a heterologous polypeptide into a bacterial cell, thereby stably expressing the heterologous polypeptide. In some embodiments, the coding sequence for the heterologous polypeptide is included on a separate expression vector than the coding sequence for the ALP. In some embodiments, the heterologous polypeptide is expressed for at least 5, 10, 15, 20, 25, 30, 35, 40, 50, or more generations (i.e., cell divisions) of bacteria. In some embodiments, the expression vector encoding the heterologous polypeptide is maintained for at least 5, 10, 15, 20, 25, 30, 35, 40, 50, or more generations of bacteria. In some embodiments, expression of the heterologous polypeptide is maintained for a longer period of time (e.g., at least 5-, 10-, 15-, 20-, or 50-fold longer) than in bacteria lacking the stability system.

[0026] In some embodiments, the invention provides a method for limited expression of a heterologous polypeptide. In some embodiments, the method comprises introducing a vector encoding an ALP7 and a heterologous polypeptide into a bacterial cell, wherein the ALP7 has a substitution at a position corresponding to residue 218 of SEQ ID NO:1, when the ALP7 is optimally aligned to the polypeptide sequence of SEQ ID NO:1. In some embodiments, the method comprises introducing a vector encoding an ALP7 and a heterologous polypeptide into a bacterial cell, wherein the ALP7 has a substitution at a position corresponding to residue 219 of SEQ ID NO:1, when the ALP7 is optimally aligned to the polypeptide sequence of SEQ ID NO:1. In some embodiments, the heterologous polypeptide is comK. In some embodiments, the vector further comprises a mobilization region comprising an origin of transfer.

[0027] In some embodiments, the invention provides an isolated plasmid expression vector for conferring competence on a bacterial cell that is otherwise resistant to transformation with exogenous DNA or RNA, i.e., a competence vector. In some embodiments, the competence vector comprises a stability system as described herein, a polynucleotide encoding comK, and a mobilization region comprising an origin of transfer. The comK can be derived from any bacterial species or strain. In some embodiments, the comK is from a Bacillus strain. In some embodiments, the invention provides a polynucleotide sequence encoding an ALP, a polynucleotide encoding comK, and mobilization region comprising an origin of transfer. In some embodiments, the ALP is an ALP7. In some embodiments, the plasmid expression vector further comprises a polynucleotide encoding an additional heterologous polypeptide, e.g., a commercially valuable polypeptide or a com protein family member. In some embodiments, the competence vector confers increased competence on a bacteria compared to bacteria lacking the competence vector. In some embodiments, bacteria comprising the competence vector take up at least 5, 10, 20, 30, 40, 50, 100, 200, 400, 500, 1000, or more times as much exogenous DNA than bacteria lacking the vector. Competence can be measured by determining the number of colonies formed under selective conditions that rely on expression of the exogenous DNA, as will be understood by one of skill in the art.

[0028] The invention further provides methods for conferring competence on a bacteria, i.e., rendering bacteria competent. In some embodiments, bacteria lacking the competence system described herein are untransformable, or resistant to uptake of exogenous DNA. In some embodiments, the method comprises introducing a plasmid expression vector encoding a stability system as described herein, a polynucleotide encoding comK, and mobilization region comprising an origin of transfer (i.e., a competence vector). In some embodiments, the introducing comprises conjugation. In some embodiments, the stability system comprises an ALP, e.g., an ALP7. In some embodiments, the method comprises (i) introducing an isolated plasmid expression vector comprising a polynucleotide encoding comK and mobilization region comprising an origin of transfer and (ii) introducing an isolated plasmid expression vector comprising a polynucleotide encoding a prokaryote derived ALP having at least 90% identity to a polypeptide sequence selected from the group consisting of SEQ ID NOs:1-409. The steps can be in any order or simultaneous. In some embodiments, the introducing in step (i) is accomplished using conjugation. In some embodiments, the method further comprises introducing an additional plasmid expression vector comprising a polynucleotide encoding a heterologous polypeptide. In some embodiments, the coding sequence for the heterologous polypeptide is included on the plasmid expression vector of part (i). In some embodiments, the coding sequence for the heterologous polypeptide is included on the plasmid expression vector of part (ii). In some embodiments, the ALP confers limited stability, e.g., so that the bacteria are only competent for a limited time.

[0029] One of skill will understand that the stability system and competence system of the invention can be used alone or in any combination, on the same vector, or on different vectors. The stability system and/or the competence system can be used to express a desired heterologous protein in bacterial strains that are otherwise not amenable to stable expression of heterologous proteins.

### BRIEF DESCRIPTION OF THE DRAWINGS

[0030] FIG. 1 illustrates the plasmid constructs used. The pAID3129 plasmid comprises the ALP7 stability system, whereas the pAID3171 plasmid does not. The panel on the right shows that the pAID3129 plasmid is maintained over more than 30 generations of B. subtilis, whereas the pAID3171 plasmid is lost.

[0031] FIG. 2. Phylogenetic analysis identifies more than 35 families of bacterial actins. (A) Phlyogenetic tree of the bacterial actins-like proteins (Alps). Protein sequences were derived from the BLAST search series as described in the text and in the Examples. The tree was generated by the neighbor-joining method, and bootstrap values corresponding to confidence levels are indicated for selected branches. Color and number assignments for each family are arbitrary and do not signify relatedness. The five previously characterized families are indicated, as are representatives of three new families: Alp6A, previously designated as GP207 of Bacillus thuringiensis phage 03058-36 (Thomas et al., Virology 368:405-421 (2007)); Alp7A, previously designated as OrfB of Bacillus subtilis natto plasmid pLS20 (Meijer et al., Nucleic Acids Res 23:3214-3223 (1995)); Alp8A, previously designated as Orf250 of Proteus vulgaris plasmid Rts1 (Murata et al., J Bacteriol 184:3194-3202 (2002)). (B) Alignment of the PHOSPHATE 1, CONNECT 1 and PHOSPHATE 2 regions (as per Bork et al., Proc Natl Acad Sci USA 89:7290-7294 (1992)) of human beta-actin and representatives of the eight families: B. subtilis MreB, B. subtilis FtsA, E. coli plasmid R1 ParM, M. magnetospirullum MamK, B. subtilis natto plasmid pLS32 AlfA, Alp 6A, Alp7A, Alp8A. Conserved residues corresponding to actin D11 (red), G13 (red), Q137 (blue), D154 (red), and G156 (red) are highlighted. (C-F) Fluorescence microscopy images of (C) pP_{xyl}alp6A-gfp1DH5α, (D) pP_{xyl}alp7A-gfp/MG1655, (E) pP_{xyl}alp7A/MG1655, and (F) pP_{trca}lp8A-gfp/TOP10; the promoter is not the true Ptrc promoter but the variant that is present in plasmid pDSW210 (Weiss et al., J. Bacteriol. 181:508-520 (1999)). Scale bar (F) equals 1 μm; all images are at the same scale.

[0032] FIG. 3. Alp7A is required for plasmid stability and Alp7A-GFP is functional as well. (A) Plasmid derivatives of the alp7AR region of B. subtilis natto plasmid pLS20. The uppermost schematic depicts the alp7AR operon, the divergently transcribed orfA gene, and the intervening origin of replication. The insert in (1) mini-pLS20: the entire alp7AR operon is included as is a portion of orfA containing a putative replication terminator and decatenation site (Meijer, W. J. et al., Nucleic Acids Res 23:3214-3223 (1995)); (2) mini-pLS20Δ(alp7AR), containing only the origin of replication; (3) mini-pLS20Δ(alp7A): as mini-pLS20, but alp7A is replaced by an in-frame deletion of the gene; (4) mini-pLS20alp7A-gfp: as mini-pLS20, but alp7A is replaced by alp7A-gfp; the sequence that is immediately upstream of alp7R in pLS20 is included so as to reproduce its native translational context. (B and C) Plasmid retention in logarithmic phase cultures in the absence of antibiotic selection: (B) mini-pLS20 (black), mini-pLS20Δ(alp7AR) (red), mini-pLS20Δ(alp7A) (blue); (C) mini-pLS20alp7A-gfp (green), mini-pLS20alp7A(D212A) (blue), mini-pLS20alp7A(E180A) (red). (D) Chromosomal constructs for plasmid complementation experiment in Panel E: P_{xyl}alp7A-gfp or P_{xyl}alp7A were integrated into the chromosome of B. subtilis strain PY79 at thrC. (E) Restoration of plasmid stability to mini-pLS20Δ(alp7A) by expression of Alp7A or Alp7A-GFP from inducible chromosomal constructs (Panel D). Strains were grown in the presence or absence of 0.25% xylose for 21 generations. (F) Immunoblot of PY79 transformants containing (lane 1) pLS20catalp7A::pMUTINalp7A-gfp; (lane 2) mini-pLS20alp7A-gfp; (lanes 3-7) xylose induction profile of Alp7A-GFP produced from the chromosome in mini-pLS20Δ(alp7A)/PY79 thrC::xylR⁺P_{xylA}alp7A-gfp. The two panels are derived from a single filter that was probed with anti-Alp7A antisera.

[0033] FIG. 4. Alp7A forms filaments in vivo. (A) Immunoblot of B. subtilis strain PY79 or transformants of PY79 carrying plasmids containing alp7A or alp7A-gfp: (lane 1) no plasmid; (lane 2) pLS20cat; (lane 3) mini-pLS20; (lane 4) pLS20catalp7A::pMUTINalp7A-gfp; (lane 5) mini-pLS20alp7A-gfp. The filter was probed with anti-Alp7A antisera. (B-I) Fluorescence microscopy images of (B, C) mini-pLS20alp7A-gfp/PY79; (D, E) pLS20catalp7A::pMUTINalp7A-gfp/PY79 (not deconvolved); (F, G) mini-pLS20alp7A(D212A)-gfp/PY79; (H and I) mini-pLS20alp7A(E180A)-gfp/PY79. (B, D, F, H) Membranes stained with FM4-64. (J) FRAP analysis of Alp7A(E180A)-GFP. Left panel, fluorescence microscopy images pre-bleach, post-bleach, 30 s post-bleach, 60 s post-bleach; right panel, corresponding fluorescence intensity plot (linear scale, arbitrary units). Scale bar (I, J) equals 1 μm; all images are at the same scale.

[0034] FIG. 5. Alp7A filaments show dynamic instability in vivo. (A) Images from time-lapse fluorescence microscopy of mini-pLS20alp7A-gfp/PY79. Scale bar equals 1 μm; all images are at the same scale. (B-D) Growth and shrinkage of individual filaments. The filaments in (A) are tracked in (B); the white circles correspond to the filament on the left, the blue circles to the filaments on the right. (E) Images from time-lapse fluorescence microscopy of pLS20catalp7A::pMUTINalp7A-gfp/PY79. Scale bar equals 1 micron; all images are to the same scale. (F-H) Growth and shrinkage of individual filaments. The filament in (E) is tracked in (F).

[0035] FIG. 6. Production of dynamic filaments requires additional elements of pLS20. (A-D) Filament length (microns) as a function of time (seconds) of two representative filaments in strain PY79 thrC::xylR⁺P_{xylA}alp7A-gfp containing (A) no plasmid (see Movie S7); (B) mini-pLS20 (see Movie S8); (C) mini-pLS20Δ(alp7A) (see Movie S9); (D) mini-pLS20Δ(alp7AR).

[0036] FIG. 7. DNA containing alp7R and the DNA directly upstream of alp7A lowers the critical concentration for Alp7A filament formation. B. subtilis strain PY79 thrC::xylR⁺P_{xylA}alp7A-gfp has a chromosomal copy of alp7A-gfp expressed from the xylose promoter (FIG. 3D). This strain or a transformant containing the mini-pLS20Δ(alp7A) plasmid were grown in various concentrations of xylose, and alp7A-gfp expression was monitored by immunoblot with anti-Alp7A antisera. (A-B) Xylose-induction profile of the strain lacking the mini-pLS20Δ(alp7A)plasmid (A) or containing the plasmid (B); (A, first lane) Alp7A-GFP produced from mini-pLS20alp7A-GFP. (C-L) Fluorescence microscopy images of glutaraldehyde-fixed cells of the strain lacking the plasmid (C-G), or containing the plasmid (H-L) after induction with xylose for 1 h at (C and H) 0.01%; (D and I) 0.025%; (E and J) 0.05%; (F and K) 0.10%; (G and L) 0.25%. Scale bar (G) equals 1 μm; all images are at the same scale. (M) Percentage of cells containing at least one filament in strains containing the plasmid (green circles) or lacking the plasmid (black circles) after xylose induction. At least 100 cells were scored for each xylose concentration. (N) Quantitation of immunoblots in (A) black circles, and (B) green circles.

[0037] FIG. 8. Alp7A filaments colocalize with mini-pLS20, push plasmids apart, and treadmill. (A-F) Fluorescence microscopy images of fixed cells containing LacI-CFP tagged mini-pLS20alp7A-gfp. (A and D) Membranes (FM 4-64) and filaments (Alp7A-GFP); (B and E) Plasmid foci (LacI-CFP) and filaments (Alp7A-GFP); (C and F) Plasmid foci (LacI-CFP). Scale bar equals 1 μm; all images are at the same scale. (G) Plasmids per cell vs. cell length. (H) Filaments per cell vs. cell length. (I) Plasmids per cell vs. filaments per cell. The area of the spheres corresponds to the number of occurrences. For (G-I), 91 cells containing 173 filaments and 546 plasmid foci were examined. There was an average of 5.9 plasmid foci per cell, which is consistent with the reported plasmid copy number (Meijer, W. J. et al., Nucleic Acids Res 23:3214-3223 (1995)), and there was an average of 1.9 filaments per cell. (J and K) Time-lapse of growing cells containing LacI-CFP tagged mini-pLS20alp7A-gfp, showing plasmids (blue) pushed apart by a filament (green). Images were collected at the indicated time intervals (seconds). (L) Photobleaching analysis reveals treadmilling behavior. A pre-bleach image (−4 seconds) and post-bleach images that were collected at 4 second intervals are shown. The distance between the left end of the filament (line a) and the bleached zone boundary (line b) increases with time, as the right end undergoes depolymerization (line c). (M) A schematic illustrating how fluxing can occur. If a filament containing a plus and minus end is treadmilling in place, then after photobleaching a small region (red circle), the bleached subunits (black circles) will “flux” in one direction as new subunits add to the plus end. (N) Photobleaching of filaments containing plasmids (blue) at each end. A pre-bleach image (−7 s) and 9 post-bleach images taken at the indicated times (seconds) are shown (left panel) beside three dimensional GFP fluorescence intensity plots corresponding to selected time points (right panel). Over time, the bleached zone (red bracket in plots) moves to the left as a region of lower fluorescence intensity (white bracket) increases in length.

[0038] FIG. 9 lists the primer sequences used in cloning and characterizing the ALP sequences of the invention.

[0039] FIG. 10. (A) A mutation in the alp7A gene in which aspartic acid (D) at position 218 is replaced with asparagine (N) renders the plasmid unstable. Cultures were grown for approximately 30 generations without antibiotics and the percentage of cells containing plasmid was determined. (B) A mutation in the alp7A gene in which the aspartic acid (D) at position 219 is replaced with asparagine (N) reduces plasmid stability. Cultures were grown for approximately 30 generations without antibiotics and the percentage of cells containing the plasmid was determined.

### DETAILED DESCRIPTION OF THE INVENTION

### I. Introduction to the Invention

[0040] The present invention provides for the first time a single expression vector that is stably transmitted, i.e., maintained through multiple successive generations, in several different species of bacteria. The invention thus provides a valuable tool for protein production, including industrial applications that require reliable, high levels of expression. The inventors have also discovered methods and compositions that allow promiscuous transmission into bacterial species that are otherwise resistant to transformation. The compositions of the invention can also be manipulated so that stable transmission is “crippled” or reduced, and the expression vector is not maintained in the bacteria beyond one or a few generations.

[0041] The inventors have conducted a phylogenetic bioinformatic search and uncovered more than 35 highly divergent families of actin-like proteins (ALPs) in bacteria. The sequences discovered were not previously recognized as related to actin, and many were not even recognized as coding sequences. The genes are found primarily on phage genomes, on plasmids, and on integrating conjugative elements, and are involved in a variety of functions. The ALPs share the actin function of forming filaments in the cell.

[0042] One of these proteins, ALP7, is described herein in detail. ALP7A forms filaments with dynamic properties, a process aided by other elements from the plasmid on which it is encoded. The filaments of ALP7A, a plasmid partitioning protein and one of the most divergent of the ALPs, display dynamic instability and also treadmill. The other elements from the plasmid aid to assemble ALP7A into dynamic polymers in the cell. ALP7 family members share plasmid partitioning activity. Treadmillling is a behavior associated with eukaryotic actin and has also been reported in the C. crescentus MreB. Dynamic instability is a fundamental property of the bacterial actin ParM.

[0043] Not all of the Alps are involved in plasmid partitioning. Alp8A is encoded on a plasmid but is not required for its stability. Other Alp8 family members are encoded on integrative conjugative elements that do not replicate autonomously, and so would not require a partitioning machinery.

[0044] The findings disclosed herein indicate that the ALPs are actin relatives. That the proteins characterized thus far give rise to filaments indicate that the bacterial “actinome” is more extensive than previously appreciated.

### II. Definitions

[0045] As used herein, a “stability system” refers to the protein components required to confer stability on a mobile genetic element (e.g., plasmids, transposons, integrating conjugative elements, phage) so that the element is maintained through multiple generations (cell divisions) in a prokaryotic organism. A stability system can also refer to the expression cassette or expression vector that encodes these protein components. The stability system is capable of forming filaments (e.g., polymerization activity) and associating with mobile genetic elements (e.g., DNA binding activity). The stability system comprises a prokaryote-derived actin-like protein (ALP) as disclosed herein, and polypeptide sequences with substantial identity to these sequences. The stability system can be further designated according to the type of ALP that is included, e.g., an ALP6 stability system, or an ALP7 stability system, which will be understood to include an ALP6 or ALP7.

[0046] “Prokaryote-derived actin like proteins (ALPs)” include proteins comprising the polypeptide sequences described herein (SEQ ID NOs:1-409), as well as sequences with substantial identity to those sequences (i.e., a sequence has at least 30% identity, e.g., 35%, 45%, 50%, 60%, 65%, 75%, 85%, 90%, 91%, 92%, 93, 94%, 95%, 96%, 97%, 98%, 99%, or 100% identity, to a reference sequence, e.g., any one of SEQ ID NOs: 1-409, e.g., or any one of SEQ ID NO:1-14), that have at least one actin-like activity. Substantial identity is determined by comparison and alignment for maximum correspondence over a comparison window, or designated region as measured using one of the following sequence comparison algorithms or by manual alignment and visual inspection. Such sequences are said to be “substantially identical.” ALP sequences found in bacteria are highly divergent, and proteins are grouped into different Alp families with a 30% cutoff. For example, members of the Alp7 family share only 35% identity, yet share the same filament-forming activity. This is very different from eukaryotic actin, which is highly conserved The polynucleotide sequences that encode ALP polypeptides are included in the invention, as are polynucleotide sequences that are substantially identical to a polynucleotide sequence encoding a polypeptide sequence disclosed herein.

[0047] Actin-like activities include polymerization and filament formation, DNA binding, treadmilling, hydrolysis of ATP and/or GTP, interaction with cytoskeletal proteins, interaction with cell membranes, determination of cell shape, effecting cell motility, etc.

[0048] Human beta actin is a known 375 amino acid cytoskeletal protein that forms part of the contractile apparatus. The polypeptide sequence can be found under accession number P60709.1.

[0049] The term “nucleic acid” or “polynucleotide” refers to deoxyribonucleic acids (DNA) or ribonucleic acids (RNA) and polymers thereof in either single- or double-stranded form. Unless specifically limited, the term encompasses nucleic acids containing known analogs of natural nucleotides that have similar binding properties as the reference nucleic acid. Unless otherwise indicated, a particular nucleic acid sequence also implicitly encompasses conservatively modified variants thereof (e.g., degenerate codon substitutions), alleles, orthologs, single nucleotide polymorphisms (SNPs), and complementary sequences as well as the sequence explicitly indicated. Specifically, degenerate codon substitutions may be achieved by generating sequences in which the third position of one or more selected (or all) codons is substituted with mixed-base and/or deoxyinosine residues (Batzer et al., Nucleic Acid Res. 19:5081 (1991); Ohtsuka et al., J. Biol. Chem. 260:2605-2608 (1985); and Rossolini et al., Mol. Cell. Probes 8:91-98 (1994)).

[0050] The phrase “nucleic acid sequence encoding” refers to a nucleic acid which directs the expression of a specific protein or peptide. The nucleic acid sequences include both the DNA strand sequence that is transcribed into RNA and the RNA sequence that is translated into protein. The nucleic acid sequences include both the full length nucleic acid sequences as well as non-full length sequences derived from the full length sequences. It should be further understood that the sequence includes the degenerate codons of the native sequence or sequences which may be introduced to provide codon preference in a specific host cell.

[0051] “Conservatively modified variants” applies to both amino acid and nucleic acid sequences. With respect to particular nucleic acid sequences, “conservatively modified variants” refers to those nucleic acids that encode identical or essentially identical amino acid sequences, or where the nucleic acid does not encode an amino acid sequence, to essentially identical sequences. Because of the degeneracy of the genetic code, a large number of functionally identical nucleic acids encode any given protein. For instance, the codons GCA, GCC, GCG and GCU all encode the amino acid alanine. Thus, at every position where an alanine is specified by a codon, the codon can be altered to any of the corresponding codons described without altering the encoded polypeptide. Such nucleic acid variations are “silent variations,” which are one species of conservatively modified variations. Every nucleic acid sequence herein that encodes a polypeptide also describes every possible silent variation of the nucleic acid. One of skill will recognize that each codon in a nucleic acid (except AUG, which is ordinarily the only codon for methionine, and TGG, which is ordinarily the only codon for tryptophan) can be modified to yield a functionally identical molecule. Accordingly, each silent variation of a nucleic acid that encodes a polypeptide is implicit in each described sequence.

[0052] As to amino acid sequences, one of skill will recognize that individual substitutions, deletions or additions to a nucleic acid, peptide, polypeptide, or protein sequence which alters, adds or deletes a single amino acid or a small percentage of amino acids in the encoded sequence is a “conservatively modified variant” where the alteration results in the substitution of an amino acid with a chemically similar amino acid. Conservative substitution tables providing functionally similar amino acids are well known in the art. Such conservatively modified variants are in addition to and do not exclude polymorphic variants, interspecies homologs, and alleles of the invention.

[0053] The following eight groups each contain amino acids that are conservative substitutions for one another:

### 1) Alanine (A), Glycine (G);

[0054] 2) Aspartic acid (D), Glutamic acid (E);

### 3) Asparagine (N), Glutamine (Q);

### 4) Arginine (R), Lysine (K);

### 5) Isoleucine (I), Leucine (L), Methionine (M), Valine (V);

### 6) Phenylalanine (F), Tyrosine (Y), Tryptophan (W);

### 7) Serine (S), Threonine (T); and

### 8) Cysteine (C), Methionine (M)

[0055] (see, e.g., Creighton, Proteins, W. H. Freeman and Co., N.Y. (1984)).

[0056] A polynucleotide sequence is “heterologous to” a second polynucleotide sequence if it originates from a foreign species, or, if from the same species, is modified by human action from its original form. For example, a promoter operably linked to a heterologous coding sequence refers to a coding sequence from a species different from that from which the promoter was derived, or, if from the same species, a coding sequence which is different from any naturally occurring allelic variants.

[0057] The term “recombinant” when used with reference, e.g., to a cell, or nucleic acid, protein, or vector, indicates that the cell, nucleic acid, protein or vector, has been modified by the introduction of a heterologous nucleic acid or protein or the alteration of a native nucleic acid or protein, or that the cell is derived from a cell so modified. Thus, e.g., recombinant cells express genes that are not found within the native (non-recombinant) form of the cell or express native genes that are otherwise abnormally expressed, under expressed or not expressed at all. By the term “recombinant nucleic acid” herein is meant nucleic acid, originally formed in vitro, in general, by the manipulation of nucleic acid, e.g., using polymerases and endonucleases. In this manner, operably linkage of different sequences is achieved. Thus an isolated nucleic acid, in a linear form, or an expression vector formed in vitro by ligating DNA molecules that are not normally joined, are both considered recombinant for the purposes of this invention. It is understood that once a recombinant nucleic acid is made and reintroduced into a host cell or organism, it will replicate non-recombinantly, i.e., using the in vivo cellular machinery of the host cell rather than in vitro manipulations; however, such nucleic acids, once produced recombinantly, although subsequently replicated non-recombinantly, are still considered recombinant for the purposes of the invention. Similarly, a “recombinant protein” is a protein made using recombinant techniques, i.e., through the expression of a recombinant nucleic acid as depicted above.

[0058] A “promoter” is defined as an array of nucleic acid control sequences that direct transcription of a nucleic acid. As used herein, a promoter includes necessary nucleic acid sequences near the start site of transcription, such as, in the case of a polymerase II type promoter, a TATA element. A promoter also optionally includes distal enhancer or repressor elements, which can be located as much as several thousand base pairs from the start site of transcription. A “constitutive” promoter is a promoter that is active under most environmental and developmental conditions. An “inducible” promoter is a promoter that is active under environmental or developmental regulation. The term “operably linked” refers to a functional linkage between a nucleic acid expression control sequence (such as a promoter, or array of transcription factor binding sites) and a second nucleic acid sequence, wherein the expression control sequence directs transcription of the nucleic acid corresponding to the second sequence.

[0059] An “expression vector” is a nucleic acid construct, generated recombinantly or synthetically, with a series of specified nucleic acid elements that permit transcription of a particular nucleic acid in a host cell. The expression vector can be part of a plasmid, virus, or nucleic acid fragment. Typically, the expression vector includes a nucleic acid to be transcribed operably linked to a promoter.

[0060] The term “operably linked” refers to a functional linkage between a nucleic acid expression control sequence (such as a promoter, or array of transcription factor binding sites) and a second nucleic acid sequence, wherein the expression control sequence directs transcription of the nucleic acid corresponding to the second sequence.

[0061] Two nucleic acid or polypeptide sequences are said to be “identical” if the sequence of nucleotides or amino acid residues, respectively, in the two sequences is the same when aligned for maximum correspondence as described below. The term “complementary to” is used herein to mean that the sequence is complementary to all or a portion of a reference polynucleotide sequence.

[0062] Optimal alignment of sequences for comparison may be conducted by the local homology algorithm of Smith and Waterman Add. APL. Math. 2:482 (1981), by the homology alignment algorithm of Needle man and Wunsch J. Mol. Biol. 48:443 (1970), by the search for similarity method of Pearson and Lipman Proc. Natl. Acad. Sci. (U.S.A.) 85: 2444 (1988), by computerized implementations of these algorithms (GAP, BESTFIT, BLAST, FASTA, and TFASTA in the Wisconsin Genetics Software Package, Genetics Computer Group (GCG), 575 Science Dr., Madison, Wis.), or by inspection. Optimal alignment generally refers to the alignment that results in the highest percent homology. This can result in gaps in one sequence, or alignment with a conservative or similar amino acid instead of a perfect match. The term is understood generally in the art.

[0063] “Percentage of sequence identity” is determined by comparing two optimally aligned sequences over a comparison window, wherein the portion of the polynucleotide sequence in the comparison window may comprise additions or deletions (i.e., gaps) as compared to the reference sequence (which does not comprise additions or deletions) for optimal alignment of the two sequences. The percentage is calculated by determining the number of positions at which the identical nucleic acid base or amino acid residue occurs in both sequences to yield the number of matched positions, dividing the number of matched positions by the total number of positions in the window of comparison and multiplying the result by 100 to yield the percentage of sequence identity.

[0064] The term “substantial identity” of polypeptide or polynucleotide sequences refers to a sequence with at least 30% sequence identity. Alternatively, percent identity can be any integer from 65% to 100%. In some embodiments, the sequences share at least: 65%, 70%, 75%, 80%, 85%, 90%, 95%, 98%, or 99%, compared to a reference sequence using the programs described herein; preferably BLAST using standard parameters, as described below. Accordingly, ALP sequences of the invention include polypeptide sequences that have substantial identity to the sequences disclosed herein. The ALP sequences of the invention also include polynucleotide sequences that are substantially identical to polynucleotides that encode the polypeptide sequences disclosed herein. One of skill will recognize that these values can be appropriately adjusted to determine corresponding identity of proteins encoded by two nucleotide sequences by taking into account codon degeneracy, amino acid similarity, reading frame positioning and the like.

[0065] Polypeptides which are “substantially similar” share sequences as noted above except that residue positions which are not identical may differ by conservative amino acid changes. Conservative amino acid substitutions refer to the interchangeability of residues having similar side chains. For example, a group of amino acids having aliphatic side chains is glycine, alanine, valine, leucine, and isoleucine; a group of amino acids having aliphatic-hydroxyl side chains is serine and threonine; a group of amino acids having amide-containing side chains is asparagine and glutamine; a group of amino acids having aromatic side chains is phenylalanine, tyrosine, and tryptophan; a group of amino acids having basic side chains is lysine, arginine, and histidine; and a group of amino acids having sulfur-containing side chains is cysteine and methionine. Preferred conservative amino acids substitution groups are: valine-leucine-isoleucine, phenylalanine-tyrosine, lysine-arginine, alanine-valine, aspartic acid-glutamic acid, and asparagine-glutamine.

### III. General Recombinant Methods

[0066] The recombinant methodology used in the invention is routine in the field of recombinant genetics. Basic texts disclosing the general methods include Sambrook & Russell, Molecular Cloning, A Laboratory Manual (3rd ed. 2001); Kriegler, Gene Transfer and Expression: A Laboratory Manual (1990); and Current Protocols in Molecular Biology (Ausubel et al., eds., 1994)).

[0067] To obtain high level protein expression, one typically subclones a nucleic acid sequence encoding the protein of into an expression vector that contains a promoter, typically a heterologous promoter, to direct transcription, a transcription/translation terminator, and a ribosome binding site for translational initiation. Suitable promoters are well known in the art and described, e.g., in Sambrook & Russell and Ausubel et al. Bacterial expression systems for expressing the protein are available in, e.g., E. coli, Bacillus sp., and Salmonella (Palva et al., Gene 22:229-235 (1983); Mosbach et al., Nature 302:543-545 (1983)). Tags can also be added to recombinant proteins to provide convenient methods of isolation, e.g., c-myc, biotin, poly-His, etc. Kits for such expression systems are commercially available.

### IV. Utilities

[0068] The ALPs of the invention can be used in stability systems to confer stability on extrachromosomal genetic material (i.e., mobile genetic elements, such as plasmids). Stability systems can thus be used in combination with expression vectors encoding heterologous proteins for reliable, continued expression of a desired protein product. The stability system can be encoded on the same expression vector or a different expression vector than the heterologous protein. In addition, more than one heterologous protein can be expressed.

[0069] A particular application of the stability system includes conferring competence on otherwise genetically incompetent or resistant bacterial cells. In this case, the comK gene is expressed in combination with the stability system, either on the same expression vector or a different expression vector. The cells will remain competent for as long as the stability system is active in the cell, and additional expression vectors can be introduced.

[0070] An additional application for Alps is for creation of synthetic organisms. Synthetic organisms can be used for a variety of purposes, including industrial enzyme production, biofuel and electrical energy production, vaccine development, and novel anticancer therapies. One key to the creation of these novel forms of life is the development of synthetic, self replicating DNA molecules capable of being segregated into daughter cells. The stability system of the invention can be used to provide a segregation system for any self replicating DNA molecule, including synthetic genomes. The Alps described herein self-assemble into force-generating molecular machines capable of a variety of vital cellular activities, including separation of DNA molecules for division. The ALPs of the invention thus represent a large and diverse set of molecular tools—“off the shelf bioparts”—that can be used for synthetic life.

### V. Examples

### Summary of the Results

[0071] We have identified 35 distinct prokaryotic protein families that share actin activities. These are called actin like proteins (ALPs). Despite the very tenuous connection of these sequences to eukaryotic actin, we further characterized a few of these proteins for confirmation. One particularly divergent member, ALP7A, formed filaments within the cell and these filaments exhibited two dynamic behaviors, dynamic instability and treadmilling. Additional sequence from the ALP7 operon, including 165 by upstream of the ALP7A initiation site and ALP7R, was found to improve filament formation by ALP7A.

[0072] ALP7A-GFP fusion protein retained the function of ALP7A and could be used interchangeably. We thus correlated ALP7A function with its behavior in the cell. In particular, we found that mutations in two amino acids that disrupted Alp7A polymerization dynamics. The D212A mutation, which abolished filament formation, was indistinguishable from a null mutation in a plasmid stability assay. The E180A mutation, which permitted filaments to form but eliminated their dynamic properties, was almost as crippling. Moreover, we have discovered amino acid residues that can moderate the stability conferred by ALP7A. In particular, substitution of D218 results in rapid loss of the plasmid, while substitution of D219 results in a slower loss of the plasmid.

[0073] Finally, we have developed an expression construct that takes advantage of the stability system of the invention. Using the ALP7 stability construct, we added a sequence encoding comK, which is part of the com family of proteins that confer genetic competence on bacteria. The competence (or comK) system is stably passed on through multiple generations, and allows the bacterial cells to be transformed. One of skill will recognize that the competence system can be used with the modulated stability system to confer limited competence. Moreover, for bacterial strains that do not include the full complement of com genes, these can be additionally included in the cells.

### Example 1

[0074] FIG. 1 illustrates the plasmid constructs used. The pAID3129 plasmid comprises the orfB stability system (orfB and orfC), whereas the pAID3171 plasmid does not. OrfB in pAID3129 comprises the nucleotide sequence encoding orfB of pLS20, as described herein. OrfC encodes a DNA binding protein. These plasmids were transfected into a Bacillus strain and tracked over more than 30 generations. As shown in FIG. 1, the pAID3129 plasmid was maintained in 100% of the bacteria. The pAID3171 plasmid was lost, with only about 50% of the cells carrying the vector after 30 generations.

### Example 2

### Experimental Procedures

### Phylogenetic Analysis

[0075] The AlfA sequence was used to begin the BLAST iteration series; the same sequences were retrieved if other bacterial actins were used, though not necessarily in the same order.

[0076] Sequences were aligned using TCoffee and ClustalW and phylogenetic trees were constructed with ClustalW. A bootstrap consensus tree of 100 trees is shown. The 100 trees were generated by resampling the data set and creating a distance matrix using a PAM matrix to assign weights to amino acid substitutions. Neighbor joining was used to assemble the 100 distance matrices into 100 trees. Similar trees were obtained regardless of the method used. The cutoff for assignment to a family was 30% sequence identity.

### Molecular Biology

[0077] Standard techniques of molecular biology were used. Genomic DNA was purified from Bacillus with a modification of a protocol developed for Gram-negative bacteria (Neumann et al., Trends Genet. 8:332-333 (1992)). Other nucleic acid purifications were done with commercial kits manufactured by Qiagen or Invitrogen. Oligonucleotide primers were synthesized by Allele Biotechnology and Pharmaceuticals or by Integrated DNA Technologies. PfuUltra High-Fidelity Polymerase, which was used for nearly all PCR amplifications, from Stratagene. Amplifications were carried out in a Mastercycler EP (Eppendorf). Restriction endonucleases were obtained from New England Biolabs unless otherwise noted. Shrimp alkaline phosphatase was obtained from Roche Diagnostics GmbH, and T4 DNA ligase from New England Biolabs, RNAase was obtained from Qiagen and DNAase from Invitrogen. Other biochemicals and chemicals were obtained from Fisher, VWR, or Sigma. Plasmids were introduced into E. coli strains DH5α, MG1655, or TOP10 by electroporation with a Gene Pulser Xcell (Biorad) or by transformation of chemically competent cells (Hanahan DNA Cloning: A Practical Approach, (ed. D. M. Glover), pp. 109-135. IRL Press, Oxford, UK (1985)). DNA sequencing was performed by Eton Bioscience or by Genewiz. Primer sequences are listed in FIG. 9.

Sequencing of the alp7AR Operon

[0078] Semidegenerate PCR was used to amplify the latter part of the alp7A gene and the remainder of the alp7AR operon (Jacobs et al., Proc. Natl. Acad. Sci. USA 100:14339-14344 (2003)). Amplicons were cloned into the pCR2.1-TOPO vector (Invitrogen) and submitted for sequencing.

ALP7A from pLS20 Bacillus subtilis
(SEQ ID NO: 1)
MNISRMNVDFGNSMYMNLIDGYFFELPTNVVEISKEAAEGKFTSIVEDPADLKDRLLVS
TVIDETERYFLVGELAEPEVLGNQHIKKLHNKVESHIPYVTFLAATAYYQALKGKREDN
EVTIEYFQTMLPIWLLKKLDKFSEMQKRMASKFLGTHQVKVLTLGLEKELTIKVEDAAC
RIESEVARWAIKKNFDLEDKDYAEQFKNYDVVFCDLGGGTDDLVLLPAGLKPPKSRDSF
VSNTEAPFLAHLEKLRKEKLLEHFDSVRELEKFIYSNIGKTKMERRDGNTGQKFDLTDII
KKSLKEYTEIKIAQAENTFPAPKDKVYKYLYFGGVGEVLEESISVVTEERYGRDISESNHI
VAEDARLLNLYGLEVLSRAEQVKKQANEKEAQSI
ALP7A gene
(SEQ ID NO: 410)
Atgaatatttctcgtatgaacgtggactttggaaacagtatgtacatgaatttaattgatggttatttttttgaattgcctacaaatgtagtaga
gatatctaaagaagctgctgaaggaaaatttacgagtatcgttgaagatccggcagatttaaaggaccggttattagtttctacagttattgatg
aaacagagagatattttctagttggtgaacttgctgaaccagaagtgttaggcaaccaacacatcaagaagttacataataaagtagagtcacat
attccatacgtaacatttttagctgcaactgcttattaccaagcgctaaaaggcaaacgtgaagataatgaagttactattgaatactttcaaac
aatgctaccaatttggcttcttaaaaaattggataagttcagtgaaatgcagaaaaggatggcatctaaatttttgggcactcaccaagtaaagg
tgctgacattaggattagaaaaagagcttactataaaagtggaagatgcagcgtgcaggatcgaatctgaagtagcaagatgggcaataaagaa
aaactttgacctagaagataaagactatgccgaacaatttaaaaattatgacgtagttttttgtgatttaggtggcggaacagatgatctagtat
tactaccagctggattaaaaccgccaaaaagtcgtgattcttttgtttctaataccgaagcaccgtttttagcgcacttagaaaaattgagaaaa
gaaaaactcctagagcactttgatagcgttagggagcttgaaaagtttatatactcaaatattggaaaaactaagatggaacgaagagacgg
gaataccggtcagaaatttgatttaactgatatcatcaaaaaatctcttaaagaatacacagaaatcaaaatagcccaagctgaaaatacgttc
cctgcaccaaaagataaggtttacaaatacctttattttggcggtgttggcgaggtgcttgaagaatcaattagtgtggttactgaagagagata
tggccgtgatatttctgaatcaaatcatatagttgctgaggatgcaagactgctcaacttatatggccttgaagttttaagccgcgctgaacaag
taaagaaacaggcaaatgaaaaagaggcacaatcaatttag
ALP7R from pLS20 Bacillus subtilis
(SEQ ID NO: 411)
MGKNKRIPLFNVRTTQMSDEMYDFVLEQISTFSKGKSKGTFREYAFQLIERDMQQQKEE
QQNREKDRHVHDELIAMREEMKKEFRDLRKKIDQGSIYVEHKTADPKSASETIEEGQLIT
EKITGTIEEEYDYDF

### Plasmids and Plasmid Constructions

### Alp6A

[0079] Bacillus thuringiensis phage 0305φ8-36 DNA was obtained from Stephen Hardies and Julie Thomas at the University of Texas Health Science Center, San Antonio, Tex.

[0080] Plasmid pPAU12 (pP_{xyl}alp6A-gfp) was constructed from plasmid pPAU11, which contains a fusion of gfp to alp6A. pPAU11 was constructed by PCR amplification of Bacillus thuringiensis phage 0305φ8-36 DNA (Thomas et al., Virology 368:405-421 (2007)) with oligonucleotide primers P1 and P2, restriction of the amplicon with KpnI and ClaI, and ligation of the product to plasmid pMUTIN-GFP+ (Kaltwasser, M. et al., Appl. Environ. Microbiol. 68:2624-2628 (2002)) restricted with KpnI and ClaI. The cloned segment includes 41 by upstream of the alp6A initiation codon. pPAU11 DNA was amplified with oligonucleotide primers P3 and P4, the amplicon was restricted with KpnI, and ligated to pWH1520 (Rygus et al., Appl. Microbiol. Biotechnol. 35:594-599 (1991)) restricted with KpnI.

### Alp7A

[0081] Plasmid pAID3107 (pP_{xyl}alp7A-gfp) was constructed from plasmid pAID3068, which contains a fusion of gfp to alp7A. pAID3068 was constructed by PCR amplification of genomic DNA from strain IFO3335 with oligonucleotide primers P7 and P8, restriction of the amplicon with KpnI and ClaI, and ligation of the product to plasmid pMUTIN-GFP+ restricted with KpnI and ClaI. The cloned segment includes 731 by upstream of the alp7A initiation codon, pAID3068 DNA was amplified with oligonucleotide primers P9 and P10, the amplicon was restricted with KpnI and SphI, and ligated to pWH1520 restricted with KpnI and SphI, to produce pAID3107.

[0082] Plasmid pAID3129 (mini-pLS20) was constructed by PCR amplification of genomic DNA from Bacillus subtilis natto strain IFO3335 with oligonucleotide primers P11 and P12, restriction of the amplicon with NsiI and NheI, and ligation of the product to plasmid pHW 1520 restricted with NsiI and NheI. The 3501 by cloned segment contains a fragment of orfA, prematurely terminated at amino acid 141, the pLS20 origin of replication, and the orfBC (alp7AR) operon through its transcription terminator. Plasmid pAID3147 (mini-pLS20Δ(alp7A)) was constructed via a modification of the standard PCR-based site-directed mutagenesis protocol with pAID3129 as template and mutagenic oligonucleotide primers P13 and P14 (Wang et al., BioTechniques 26:680-682 (1999)). In pAID3147, alp7A is replaced by an in-frame deletion that consists of an AvrII site flanked by the first four and last five codons of the gene. Plasmid pAID3171 (mini-pLS20Δ(alp7AR)) was constructed by restriction of pAID3129 with NheI, fill-in of the 5′ overhang with T4 DNA polymerase, partial digestion with SmaI, and monomolecular ligation of the 8387 by fragment. pAID3171 contains the prematurely terminated orfA fragment, the origin of replication, and pLS20 sequences through 166 by upstream of the alp7A initiation codon.

[0083] Plasmid pEB416 (mini-pLS20 (lacO)ₓ) was constructed by introducing into pAID3129 a fragment containing a spectinomycin resistance gene flanked by lacO arrays. This fragment was constructed by modifying plasmid pLAU43 (Lau, I. F. et al., Mol. Microbiol. 49:731-743 (2003)), which contains arrays of 120 lacO operators on either side of a gene that codes for kanamycin resistance. Plasmid pSE380 (Invitrogen) was restricted with SalI and XbaI, and the 118 amino acid fragment derived from the multiple cloning site was ligated to pLAU43 restricted with SalI and XbaI. The kanamycin resistance gene in the resulting plasmid, pRL153, was then replaced with one for spectinomycin resistance from plasmid pMDS13 (Sharp and Pogliano 2002) by amplification of pMDS13 with primers P15 and P16, restriction of the amplicon with NsiI, and ligation of the product to pRL153 restricted with NsiI. Restriction of the resulting plasmid with BamHI generated the fragment that was ligated to pAID3129 restricted with Bgl II.

[0084] Plasmid pAID3205 (pP_{xyl}alp7A) was constructed from pAID3107. pAID3107 was restricted with EcoRI in the presence of ethidium bromide, then with EagI, and the two 5′ overhangs were filled in with T4 DNA polymerase. Monomolecular ligation of the resulting 9218 by fragment produced a template for site-directed mutagenesis with oligonucleotide primers P17 and P18, which modified the blunt end junction to match the transcription termination sequences to that of alp7A-gfp in pAID3107.

[0085] Plasmid pAID3195 (mini-pLS20alp7A-gfp) was constructed by ligating the 7706 by BspEI-MluI restriction fragment from pAID3147, the 2631 by BspEI-SpeI restriction fragment from methylated pAID3068, and the SpeI-MluI restricted amplicon generated by PCR amplification of pAID3147 with oligonucleotide primers P19 and P20. In pAID3147, the Δalp7A in-frame deletion and alp7AR intergenic region is interposed between alp7A-gfp and alp7R in order to place alp7R into its native translational context.

[0086] The alp7AR mutations D212A and E180A were constructed via standard PCR-based site-directed mutagenesis (Papworth et al., Strategies 8:3-4 (1996)) with template pAID3205 (for D212A) or a smaller variant of pAID3129 (for E180A) with oligonucleotide primers P21 and P22 (D212A) and oligonucleotide primers P23 and P24 (E180A). The mutations were then introduced into pAID3129 and pAID3107 by swapping in a 695 by AgeI restriction fragment.

[0087] Plasmid pAID3118 (pP_{T7}His₆-alp7A) was constructed by PCR amplification of genomic DNA from strain IFO3335 with oligonucleotide primers P25 and P26, cloning into the pCR-Blunt II-TOPO vector (Invitrogen), restriction of the resulting plasmid with NheI, and ligation of the 1179 by fragment to plasmid pET-28a(+) (Novagen) restricted with NheI.

### Alp8A

[0088] Plasmid pEB400 (pP_{trc}[Rts1 orf250]-gfp) was constructed by PCR amplification of genomic DNA from E. coli strain ER1648 with oligonucleotide primers P27 and P28, restriction of the amplicon with KpnI and PstI, and ligation of the product to pDSW210 (Weiss, D. S. et al., J. Bacteriol. 181:508-520 (1999)) restricted with KpnI and PstI. The promoter in pDSW210 is a variant of the P_{trc} promoter.

### Bacterial Strains and Strain Constructions

[0089] Bacillus subtilis natto strain IFO3335 (BGSC 27E1) (Tanaka et al., J. Bacteriol. 131:699-701 (1977)) was obtained from the Bacillus Genetic Stock Center at The Ohio State University, Columbus, Ohio. E. coli strain ER1648 containing plasmid Rts1 (Murata et al., J Bacteriol 184:3194-3202 (2002)) was obtained from Tetsuya Hayashi at the University of Miyazaki, Miyazaki, Japan. Bacillus subtilis strains BEST2125 and BEST40401 (Itaya et al., Biosci. Biotechnol. Biochem. 70:740-742 (2006)) were obtained form Mitsuhiro Itaya at the Mitsubishi Kagaku Institute of Life Sciences, Tokyo, Japan.

[0090] All physiology and microscopy experiments were carried out at 30° C. in Bacillus subtilis strain PY79 (Youngman et al., Plasmid 12:1-9 (1984)) or in E. coli strains DH5α, MG1655, or TOP10 (Invitrogen). Strain JP3100 (pLS20cat/PY79) was constructed by first conjugating plasmid pLS20cat from strain BEST40401 into strain BEST2125, and from the resulting exconjugant into PY79 (Itaya et al., Biosci. Biotechnol. Biochem. 70:740-742 (2006)). Strain JP3104 (JP3100 pLS20catalp7A::pAID3068) is an integrant of plasmid pAID3068 into the pLS20cat plasmid resident in JP3100. Strain JP3161 (PY79 thrC::xylR⁺P_{xylA}alp7A-gfp) was constructed by integration into the PY79 chromosome of a segment of plasmid pAID3107 containing the xylR gene and P_{xylA}alp7A-gfp. A 3918 by segment was amplified from pAID3107 with primers P29 and P30, the amplicon was restricted with BglII, and the product was ligated to B. subtilis chromosomal integration vector pDG1664 (Guérot-Fleury et al., Gene 180:57-61 (1996)) restricted with BamHI, to match the transcriptional orientation of the threonine operon on the vector. The cloned segment was then integrated into the PY79 chromosome at thrC by a double recombination event. The same strategy was used to construct strain JP3206 in which a 3180 segment of plasmid pAID3205 containing the xylR gene and P_{xyl}alp7A is integrated into the PY79 chromosome.

[0091] Strain EBS1340 (PY79 amyE::P_{xylA}[lacI-cfp3A]) was constructed by integrating into the PY79 chromosome a segment from plasmid pEB387, a derivative of the B. subtilis chromosomal integration vector pDG1662 (Guérot-Fleury et al., Gene 180:57-61 (1996)). pEB387 was constructed from plasmid pMDS78, a derivative of pDG1662 that contains P_{spollR}gfp, the gfp gene under control of the B. subtilis spoIIR promoter (Sharp et al., Science 295:137-139 (2002)). The spoIIR promoter region in pMDS78 was replaced with the spoIIE promoter region by PCR amplification of the spoIIE promoter region from PY79 with primers P31 and P32, restriction of the amplicon with BamHI and EcoRI, and ligation of the product to pMDS78 restricted with BamHI and EcoRI. The gfp gene in this intermediate plasmid was then replaced with the cfp3A gene by PCR amplification of the gene from pSCFP3A-C1 (Kremers et al., Biochemistry 45:6570-6580 (2006)) with primers P33 and P34, restriction of the amplicon with SpeI and EagI, and ligation of the product to the intermediate plasmid restricted with SpeI and EagI. The lad fusion to cfp3A was constructed in this second intermediate plasmid. The lacI gene lacking the coding sequence for the last 11 amino acids was amplified from pMUTIN-GFP with primers P35 and P36, the amplicon was restricted with SpeI and BamHI, and the product was ligated to the second intermediate plasmid restricted with Spe I and BamHI. The spoIIE promoter in this plasmid, pEB307, was then replaced with P_{xyl} by PCR amplification of plasmid pEA18 (Quisel et al., Mol. Cell. 4:665-672 (1999)) with primers P37 and P38, restriction of the amplicon with BglII and EcoRI, and ligation of the product to pEB307 restricted with BglII and EcoRI. Lastly the ribosome binding site for the lacI-cfp3A fusion in this plasmid, pEB384, was replaced with an optimized version generated by amplification of the fusion from pEB384 with primers P34 and P39, digestion of the amplicon with HindIII, and ligation pEB384 digested with Hind III. P39 introduces the modified ribosome binding site and also appends eight codons (MKNIEKVS) to the beginning of the lacI gene. The P_{xyl}lacI-cfp3A gene fusion was then integrated onto the PY79 chromosome at amyE by a double recombination event, to produce EBS1340.

[0092] All other Bacillus subtilis strains were constructed by standard transformation of PY79 or derivatives of PY79 with the plasmids described (Dubnau et al., J. Mol. Biol. 56:209-221 (1971)). pLS20 was introduced into strains by conjugation.

[0093] Media for strains containing pLS20cat was supplemented with 5 μg/ml chloramphenicol. Media for strains containing derivatives of pWH1520 was supplemented with 100 μg/ml ampicillin or carbenicillin for E. coli, or with 10 μg/ml tetracycline for Bacillus. Erythromycin was used at 2 μg/ml for Bacillus, kanamycin at 50 μg/ml for E. coli, and spectinomycin was used at 100 μg/ml for either Bacillus or E. coli.

### Plasmid Stability and Plasmid Stability Complementation Assays

[0094] Shake flask cultures in LB medium were inoculated from small starter cultures in LB medium supplemented with 5 μg/ml chloramphenicol or 10 μg/ml tetracycline. Cultures were aerated at 250 RPM and maintained in exponential growth at 30° C. by iterative 1/60 dilution into flasks containing prewarmed medium at early exponential phase (OD₆₀₀=0.1 or 0.2), corresponding to approximately six generations. Growth was taken to the end of 30 generations. At each dilution, samples were plated on nonselective medium, and 100 colonies were tested for retention of antibiotic resistance. Generation times were calculated from each interval and the mode value was applied to the entire growth course. For complementation assays, starter and experimental cultures contained an appropriate amount of xylose or glucose, growth was continued for approximately 20 generations, and platings were done only at t0 and at the end of the experiment.

### Antibody Production

[0095] Hexahistidine-tagged Alp7A was recovered from strain JP3118 as inclusion bodies after a 3 h induction at 30° C. The cells were lysed as described (Derman et al., EMBO J. 12: 879-888 (1993)), treated with DNase I (Invitrogen), and the post-lysis pellets containing the inclusion bodies were washed twice with water and then twice with a buffer consisting of 300 mM NaCl, 12.5 mM imidazole, 50 mM NaₓH_{y}PO₄, pH 8.0. The washed pellets were dissolved in the same buffer containing 8 M urea, the solution was centrifuged at 20,000×g for 30 min, and the denatured Alp7A was purified from the supernatant by nickel affinity chromatography as described except that 8 M urea was present throughout (Lim et al., Proc. Natl. Acad. Sci. USA 102:17658-17663 (2005)). Fractions containing Alp7A were dialyzed against PBS and the dialyzed protein was used for antibody preparation. Polyclonal antibodies were generated in rabbits by Antibodies Inc.

### Immunoblotting

[0096] Proteins were electrotransferred from polyacrylamide gels to PVDF membranes, and probed with the polyclonal antiserum raised against Alp7A and an anti-rabbit IgG linked to HRP (GE Healthcare). Immunoblots were developed with the ECL Plus Western Blotting Detection System (GE Healthcare), visualized with a Typhoon 9400 Variable Mode Imager (GE Healthcare), and quantitated with ImageQuant Software, version 5.0 (GE Healthcare).

### Microscopy

[0097] Fixed cells or cells from late exponential cultures were pelleted, resuspended in roughly 10% of the original volume of supernatant, affixed to a poly-L-lysine-coated cover slip, and visualized with a DeltaVision Spectris Restoration Microscopy System (Applied Precision) with an Olympus IX70 Inverted System Microscope and a Photometrics CoolSNAP HQ CCD camera. Data were collected and analyzed with DeltaVision SoftWoRx Image Analysis Software. Seven or eight images were collected as a stack of 0.15 μm increments in the z-axis. Images were deconvolved for 10 cycles in enhanced ratio mode. Deconvolved images are presented unless otherwise indicated.

[0098] For time-lapse imaging, growing cells were inoculated directly from a fresh colony onto a 1.2% agar or agarose pad containing 20% or 25% LB medium and appropriate antibiotics and inducers. The slide was incubated at 30° C. and imaged without sectioning at uniform intervals, typically 1, 3, or 5 s, in the Weather Station temperature-controlled chamber outfitted to the microscope (Precision Control). Images were deconvolved as above. The SoftWoRx Image Analysis Software was used to measure filament lengths.

[0099] For photokinetics experiments (fluorescence recovery after photobleaching [FRAP]), a 0.5 s pulse at 50% power was delivered from the Quantifiable Laser Module (488 nm) outfitted to the microscope (Applied Precision), and the field was then imaged at uniform intervals as for time-lapse. Three images were taken prior to bleaching. Images were deconvolved as above.

[0100] FM 4-64 (Molecular Probes/Invitrogen) was present in slide preparations at 2 μg/ml and in agar pads at 0.2 μg/ml (Pogliano et al., 1999).

### Coordinated Alp7A Microscopy and Protein Quantitation

[0101] For each strain, a fresh single colony was dispersed in 1 ml LB medium, 100 μl of the suspension was used to inoculate one or more 6 ml cultures of LB medium containing any selective antibiotics, and the cultures were rolled at 30° C. In early exponential phase, the cultures were induced with an appropriate amount of xylose. At the end of 1 h, at which time the culture had typically attained an OD₆₀₀ of between 0.4 and 0.5, 0.5 ml of the culture was added to 20 μl of 1M NaₓH_{y}PO₄ pH 7.4, and the cells were then fixed at room temperature for 20 min with 0.0063% glutaraldehyde in 2.7% paraformaldehyde. The fixed cells were washed three times with PBS, resuspended in PBS, and examined by fluorescence microscopy.

[0102] At the same time, 1 ml of the culture was added to 1 μl of a protease inhibitor cocktail (Sigma P2714, reconstituted according to the manufacturer's instructions), and PMSF was added to 150 μg/ml. The cells were pelleted, frozen in a dry ice/ethanol bath, and stored overnight at −70° C. The thawed cells were resuspended in 60 μl of a buffer consisting of 40% sucrose, 1 mM EDTA, 33 mM TrisCl pH 8.0 with protease inhibitors as above, and treated with 1 mg/ml lysozyme at 37° C. for 10 min. An equal volume of SDS-PAGE sample preparation buffer with 5% β-mercaptoethanol was added to the lysate, and the samples were heated at 80° C. for 10 min. Proteins were fractionated on SDS-PAGE and immunoblotted.

### Example 3

### Identification of More than 35 New Families of Bacterial Actin

[0103] Five families of actins have been characterized in bacteria (e.g., Becker et al., EMBO J. 25:5919-5931 (2006)). A bioinformatics approach was used to determine if additional family members exist. A BLAST search was conducted with our recently discovered fifth family member AlfA. Potential new actin sequences that were identified and that were distinct from the five families but still more closely related to actin than to Hsp70 or to the sugar kinases were then used to begin a second round of BLAST searches. New sequences from the second round of searches were used for a third round, and the searches were continued in this manner for several more rounds. A phylogenetic tree that was generated from these new sequences and the five already identified bacterial actin families revealed that the new sequences comprised more than 35 distinct families of bacterial actins that were only distantly related to each other, to MreB, FtsA, ParM, AlfA, and MamK, and to actin itself (FIG. 2A). Although each family shares less that 30% identity with the other families, in each sequence could be found the five actin signature motifs of amino acids that are involved in the binding and hydrolysis of ATP (Bork et al., Proc Natl Acad Sci USA 89:7290-7294 (1992)). We have therefore designated these proteins “actin-like proteins” or “Alps” (FIG. 2A).

[0104] A remarkable feature of these Alp families is their phylogenetic distance from one another. A single BLAST search with one of these proteins falls far short of revealing the expanse of the tree, turning up members of only a few of the other Alp families. A BLAST search with any member of the Alp7 family, for example, fails to identify the established bacterial actins such as MreB or ParM as statistically significant relatives, and a pairwise alignment between the Alp7 family member Alp7A and either MreB or ParM explains this failure. Alp7A is only 13% identical to MreB and to ParM; it is 11% identical to the entirely unrelated LacI, a protein of about the same length. Nevertheless, the Alp7 family members and all of the other proteins of the tree contain the five conserved motifs of the actin nucleotide binding pocket (Bork, P. et al., Proc Natl Acad Sci USA 89:7290-7294 (1992)), and they could be linked phylogenetically to MreB and to ParM if not immediately, than through intermediates in the form of members of other Alp families. The proteins of the tree are all of roughly the same length, about 350 amino acids, and none of them appear to be more closely related either to Hsp70 or to hexokinase.

[0105] The annotations accompanying the sequences indicated that the functions of many of these proteins were unknown. Although a few of the genes appeared to be on bacterial chromosomes, for example the members of the Alp32 family, most were on mobile genetic elements, e.g., phage genomes, plasmids, and integrating conjugative elements.

[0106] Given the great phylogenetic divergence among the Alps, it remained possible that these proteins shared nothing more than the ability to bind nucleotide in the manner of actin. We sought to determine whether the Alps were truly actins by looking at their polymerization properties within the cell. We chose three Alp sequences, each from a distinct family of our phylogenetic tree. We fused gfp to the respective genes, and we examined the resulting fusion proteins in E. coli. These genes were gp207 of Bacillus thuringiensis phage 0305φ8-36, from the Alp6 family (Thomas et al., Virology 368:405-421 (2007)); OrfB from Bacillus subtilis natto plasmid pLS20, from the Alp7 family (Meijer et al., Nucleic Acids Res 23:3214-3223 (1995)); and orf250 of Proteus vulgaris plasmid Rts1, from the Alp8 family (Murata et al., J Bacteriol 184:3194-3202 (2002)). As was typical of representatives of these divergent Alp families, these proteins, which we have for simplicity designated Alp6A, Alp7A, and Alp8A, shared less than 22% amino acid sequence identity with one another (average of 17.6±3.4%), but actin signature motifs could be found in all three (FIG. 2B). When produced in E. coli, each protein assembled into long filamentous structures that in many cases extended longitudinally through several cells and caused them to grow abnormally as chains in culture (FIGS. 2C, D, and F). The Alp7 family representative, pLS20 OrfB (Alp7A), was also produced without a GFP tag, and gave rise to chained cells as well (FIG. 2E).

### Example 4

### Alp7A is Required for Plasmid Stability

[0107] Even though their sequences share only a tenuous resemblance to that of actin, these three proteins, in the absence of any other elements from the source DNA or from the native host, assembled into filamentous structures in E. coli. Like actin, they could polymerize, and they could do so without auxiliary factors when produced at what we assume to be greater than their normal physiological concentrations (Tobacman et al., J Biol Chem 258:3207-3214 (1983)). Indeed, all of the ALPs we have tested to date have share this activity. In order to illuminate the connection between these proteins, their polymerization properties, their function, and actin, we chose to study one in detail. The functions of all three proteins were unknown, but the Alp7 family member Alp7A appeared to be a plasmid stability determinant. Actin-like proteins such as ParM are the nucleotide-binding components of one of the two major sets of bacterial plasmid partitioning systems. The genetic organization of these systems is typically tripartite, with a gene that codes for an ATPase, a gene that codes for a DNA-binding protein, and a centromere-like site (Gerdes et al., Cell 116:359-366 (2004)). This organization is recapitulated here (FIG. 3A). The gene for Alp7A appears to be cotranscribed with a downstream gene, alp7R, that codes for a 134 amino acid protein whose small size and high percentage of charged residues recalls the DNA-binding protein ParR. The putative alp7AR operon is situated near the pLS20 origin of replication, as is frequently the case for plasmid partitioning systems.

[0108] We constructed a plasmid to test for a role of Alp7A in plasmid partitioning. The pLS20 origin region is sufficient for replication (Meijer et al., Nucleic Acids Res 23:3214-3223 (1995)). Our plasmid contained both the pLS20 origin of replication and the alp7AR operon (FIG. 3A). However, any origin of replication can be used.

[0109] The steady state level of Alp7A in a strain containing this mini-pLS20 plasmid matched that in a strain containing pLS20 itself, demonstrating that Alp7A expression is equivalent to that from the native plasmid (FIG. 4A, lanes 2 and 3). We assayed the stability of this plasmid in B. subtilis over approximately 30 generations of vegetative growth in the absence of antibiotic selection. We assayed in parallel a variant of the plasmid in which we replaced alp7A with an in-frame deletion of the gene, and another variant that contained the pLS20 origin of replication but no alp7AR operon (FIG. 3A).

[0110] The plasmid containing both the pLS20 origin of replication and the intact alp7AR operon was as stable as pLS20 itself (Meijer et al., Nucleic Acids Res 23:3214-3223 (1995)), and was retained with no loss at all over the 30 generations of the assay (FIG. 3B). In marked contrast, the plasmid containing the alp7A deletion, mini-pLS20Δ(alp7A), was present in only 55% of the cells at 9.5 generations, and in only 2% of the cells by the end of 32 generations, an 8% loss per generation. The plasmid missing the entire alp7AR operon was also unstable, and was present in only 52% of the cells at the end of 33 generations, a 2% loss per generation (FIG. 3B). These data demonstrated that Alp7A is essential for plasmid stability and that it was very likely a component of a plasmid partitioning system. In many such systems, production of the adaptor DNA-binding protein without its nucleotide binding partner is more destabilizing than having no partitioning system at all (Lobocka et al., J Mol Biol 259:366-382 (1996)).

### Example 5

### The Alp7A-GFP Fusion Protein is Functional

[0111] Actin and the previously characterized bacterial actins are dynamic cytoskeletal proteins. In order to determine whether Alp7A was as well, we examined the behavior of our C-terminal GFP fusion protein in the context of mini-pLS20. We replaced alp7A on this plasmid with alp7A-gfp (FIG. 3A, bottom). Two lines of evidence indicated that the Alp7A-GFP protein was functionally equivalent to Alp7A and was therefore a reliable reporter of its behavior. First and most importantly, the mini-pLS20 alp7A-gfp plasmid was nearly as stable as mini-pLS20. After 30 generations of growth in the absence of selection, 97% of the cells still retained the plasmid (FIG. 3C). Immunoblotting revealed that it was the intact Alp7A-GFP fusion protein that was functioning in these cells. The fusion protein was stable; no Alp7A was being generated from proteolytic cleavage (FIG. 4A, lane 5).

[0112] Second, the fusion protein complemented mini-pLS20Δ(alp7A) as effectively as Alp7A did in a plasmid stability assay. For this experiment, alp7A and alp7A-gfp were each placed under control of the xylose promoter, each was integrated into the B. subtilis chromosome in single copy via a double recombination event (FIG. 3D), and mini-pLS20Δ(alp7A) was then introduced into each of the two strains. When the transformants were grown in the presence of xylose and assayed after approximately 21 generations, mini-pLS20Δ(alp7A) was found to be present in both strains in about 75% of the cells (FIG. 3E). In the absence of xylose, fewer than 10% of the cells retained the plasmid. Complementation in the P_{xylA}alp7A-gfp strain was again due to Alp7A-GFP itself and not to an Alp7A proteolytic cleavage product; immunoblotting revealed that the fusion protein produced from the chromosome was stable over a range of induction levels (FIG. 3F).

### Example 6

### Alp7A is a Dynamic Cytoskeletal Protein

[0113] We used fluorescence microscopy to monitor the behavior of the Alp7A-GFP protein in growing cells of B. subtilis. Nearly all of the cells contained one or more curved filaments (FIGS. 4B and C), and in time-lapse experiments these grew and shrank rapidly (FIG. 5A-D). In some cases, a single filament would grow to the length of the cell, then shrink almost to vanishing, and then grow again to its former length. In most cases, the growth or shrinkage was less extensive, but cycles of growth and shrinkage were always present (FIG. 5A-D). Profiles of several of these filaments from different cells revealed that the rate of growth was a fairly uniform 0.073±0.014 μm/s, and the rate of shrinkage was 0.14±0.040 μm/s (n=11; FIG. 5A-D). This dynamic instability, a property of eukaryotic microtubules, has also been shown to be a property of the bacterial actin ParM.

[0114] We observed similar filaments and the same dynamic instability when both Alp7A and Alp7A-GFP were produced from the same plasmid, one that we constructed by integration of a plasmid containing alp7A-gfp via a single recombination event into pLS20 itself (FIG. 4A, lane 4; FIGS. 4D and E). The filament growth rate was 0.062±0.014 μm/s, and the shrinkage rate was 0.14±0.061 μm/s (n=8; FIG. 5E-H). The similarity between this profile and that of mini-pLS20alp7A-gfp was consistent with our finding that Alp7A-GFP and Alp7A are functionally equivalent.

### Example 7

### Alp7A Function Requires that it Assemble into Filaments that are Dynamically Unstable

[0115] Polymerization is critical to actin function. In order to determine whether this was so for Alp7A, we introduced two mutations that, based upon biochemical and structural studies with actin, would be expected to alter the polymerization properties of the protein (Kabsch et al., Nature 347:37-44 (1990); Belmont et al., J Cell Sci 112:1325-1336 (1999)). We focused upon residues whose side chains, as opposed to backbone amides, interact with nucleotide (Kabsch et al., Nature 347:37-44 (1990)).

[0116] Amino acid D212 in Alp7A corresponds to amino acid D154 in actin and is located in the Phosphate 2 sequence (FIG. 2B). The D154 side chain carboxylate interacts with the β and γ phosphates of ATP and with the 13 phosphate of ADP through a bound divalent cation (Kabsch et al., Nature 347:37-44 (1990)). A mutation to alanine was introduced into mini-pLS20 and into mini-pLS20alp7A-gfp. The mini-pLS20alp7A(D212A)-gfp plasmid did not give rise to filaments in B. subtilis; instead the diffuse fluorescence present throughout the entire cell indicated that the mutant protein, although present at the same steady state levels as the wild-type protein, did not assemble into higher order structures (FIGS. 4F and G). In a plasmid stability assay, the mini-pLS20alp7A(D212A) plasmid was as unstable as mini-pLS20Δ(alp7A) (FIG. 4C). As is the case for actin, its ability to assemble into filaments is essential to the function of Alp7A.

[0117] Amino acid E180 in Alp7A corresponds to amino acid Q137 in actin and is located in the Connect 1 sequence (FIG. 2B). The Q137 side chain amide interacts with the same cation as does the side chain carboxylate of D154 (Kabsch, W. et al., Nature 347:37-44 (1990)). A mutation to alanine was introduced into mini-pLS20 and into mini-pLS20alp7A-gfp. The mini-pLS20 alp7A(E180A)-gfp plasmid produced wild-type levels of protein, but gave rise to filaments in B. subtilis that were unlike those of the wild-type (FIG. 4H-J). Whereas all of the wild-type filaments were contained entirely within a cell, many of the E180A filaments extended from one cell into the next, or even through a row of cells (FIG. 4H). And whereas the wild-type filaments were dynamically unstable, undergoing rapid cycles of polymerization and depolymerization, the E180A filaments were static. In time-lapse experiments, there were no dynamics observed, and in fluorescence recovery after photobleaching experiments (FRAP), there was no recovery of fluorescence even one minute after photobleaching (FIG. 4J). In a plasmid stability assay, the mini-pLS20alp7A(E180A) plasmid was nearly as unstable as mini-pLS20Δ(alp7A), and was present in only 18% of the cells at the end of 31 generations (FIG. 3C). As is the case for actin, and also for ParM and AlfA, the ability to assemble into dynamic filaments is essential to the function of Alp7A.

### Example 8

### Production of Dynamic Filaments Requires Additional Elements of pLS20

[0118] Our early efforts at intracellular production of Alp7A, in which filaments were observed to form in the absence of any other elements from pLS20 or from the native host, demonstrated that the ability to polymerize into filaments was most likely an intrinsic property of the protein (FIG. 2D). Subsequent experiments supported this conclusion. Alp7A-GFP, so long as it was produced at sufficiently high levels, gave rise to filaments, but to static filaments only.

[0119] In order to identify any extraneous elements required to produce dynamic filaments, we surveyed the behavior of Alp7A-GFP in several contexts by time-lapse microscopy. We observed dynamic filaments when Alp7A-GFP was produced in a strain containing pLS20 and this was so whether the alp7A-gfp gene was expressed from the same DNA macromolecule, as in the integrant described above (FIG. 5E-H) or from the chromosome. The entirety of pLS20 was not required; mini-pLS20 sufficed (FIG. 6B), and mini-pLS20Δ(alp7A) sufficed as well (FIG. 6C). But mini-pLS20Δ(alp7AR) did not; we did not observe dynamic filaments when alp7A-gfp was expressed in a cell containing only mini-pLS20Δ(alp7AR) with no other elements from pLS20 (FIG. 6D). One or more requirements for dynamic Alp7A filaments was therefore contained in 674 by of pLS20 DNA that was present on mini-pLS20Δ(alp7A) but not on mini-pLS20Δ(alp7AR). Within this 674 by are alp7R, the second gene of the putative operon, and the 165 by of DNA that lies directly upstream of the alp7A initiation codon (FIG. 3A).

### Example 9

### DNA Containing alp7R Lowers the Critical Concentration for Alp7A Filament Formation

[0120] This segment of DNA containing alp7R not only determined whether Alp7A dynamic filaments would assemble, but also at what concentration they formed. We examined the ability of Alp7A-GFP to assemble into filaments at various intracellular concentrations in either the presence or absence of the mini-pLS20Δ(alp7A) plasmid, which has the segment, by counting the number of cells that contained at least one filament. When alp7A-gfp was expressed in the absence of the plasmid, there were no filaments in the cells at xylose induction levels of 0.025% or below; the Alp7A-GFP that was produced accumulated in the cells only as soluble protein (FIGS. 7C, D, and M). Even at 0.05% xylose, filaments were present in fewer than 5% of the cells (FIGS. 7E and M). Only at 0.1% xylose and higher were filaments present in 50% of cells (FIGS. 7F, G and M). Yet immunoblotting experiments demonstrated that the steady state levels of Alp7A-GFP increased as expected with increasing concentrations of xylose (FIGS. 7A and N). We therefore concluded that there was a critical intracellular concentration that must be attained for Alp7A to polymerize into filaments.

[0121] This critical concentration was lowered when mini-pLS20Δ(alp7A) was present in the cell. At 0.05% xylose, nearly 40% of the cells had filaments (FIGS. 7J and M). Indeed filaments were present in the cells at xylose concentrations as low as 0.01% (FIG. 6H-L and M). In contrast, in the absence of the plasmid, fewer than 5% of the cells contained filaments at 0.05% xylose, even though physiological levels of Alp7A-GFP were produced (FIG. 7A). For any given concentration of the inducer xylose, the same amount of Alp7A-GFP was produced in both strains (FIGS. 7A, B, and N). Hence pLS20 DNA containing alp7R and the region upstream of alp7A lowered the critical concentration for Alp7A filament formation.

### Example 10

### Alp7A Filaments Colocalize with Plasmids

[0122] With Alp7R is a DNA-binding protein, we sought to confirm that Alp7A filaments assemble on the plasmid. If this were so, each filament would be associated with a plasmid in the cell. We tagged the mini-pLS20alp7A-gfp plasmid for fluorescence microscopy by introducing into the plasmid a tandem lac operator array and expressing lacI-cfp from a single copy integrant in the B. subtilis chromosome, and we recorded the relative positions of plasmid foci and Alp7A-GFP filaments in fixed cells. Indeed, in 99% (n=175) of the cases, filaments colocalized with plasmid foci (FIG. 8A-F). We also observed complete coincidence of foci and filaments in time-lapse experiments with growing cells (100%, n=45). Foci were typically found at the ends of filaments as would be expected if filament assembly occurred on the plasmid (FIG. 8A-C, arrowheads), but they could be found in the middle of filaments as well. Further support for the idea that filament formation begins at a plasmid came from tallying the number of plasmid foci and filaments per cell. Although there was little to no correlation between the length of a cell and the number of foci or the number of filaments within it (FIGS. 8G and H), there was a relationship between the number of foci and the number of filaments within a cell. As the number of foci per cell increased from 1 up to 10, the number of filaments per cell increased from 1 up to 4 (FIG. 8I). These findings are consistent with a mechanism in which plasmids serve as sites of assembly for Alp7A filaments.

[0123] Time-lapse experiments revealed the salient features of the plasmid partitioning mechanism. Separation of plasmid foci was achieved by filament elongation between them, and the rate of separation was consistent with the rate of filament elongation (FIGS. 8J and K). But separation was not always a simple binary operation, with a single focus at each end of a filament. For example, a focus at one end of a filament could split, giving rise to two foci that would then be separated from each other by a second elongating filament. This would result in three foci being separated by two growing filaments. This process generates one focus that appears in fixed cells to be situated in the middle of a single filament (FIG. 8A-F); in reality the focus is bridging two separate filaments.

### Example 11

### Alp7A Filaments are Capable of Treadmilling

[0124] After plasmids were separated, filaments could remain assembled and fully elongated, but it was not clear if they still retained their dynamic properties. We therefore monitored these filaments after marking them by photobleaching. An example of such an experiment is presented in FIG. 8L. An internal section of the filament was bleached with a laser—the red bracket demarcates the bleached zone—and images were captured over the next 30 seconds. As polymerization proceeded at the left end of the filament and depolymerization proceeded at the right end, the photobleached zone migrated rightward. Although the position of the filament within the cell was essentially unchanged, addition of new subunits at the left end pushed to the right the subunits already within the filament (FIGS. 8L and M). Immediately post-bleach, the filament retained its full length as the addition of new subunits at the left end was offset by the loss of subunits from the right end. But by 8 seconds post-bleach, depolymerization had outpaced polymerization and the process of filament disassembly was underway (FIG. 8L, line c).

[0125] FIG. 8N illustrates the same behavior in a cell containing CFP-LacI tagged plasmids at the filaments ends. Here photobleaching of the filament also resulted in the bleaching of part of the cytoplasmic Alp7A-GFP pool, so Alp7A filament polarity could be inferred from the observation that new (and distinctly dimmer) subunits were incorporated only at the right end of the filament. As in the filament of FIG. 8L, fluxing occurred as the bleached subunits (left bracket) were pushed to the left by the addition of subunits (right bracket) to the right end. The data of FIGS. 8L and N indicate that in addition to undergoing periods of rapid growth and shrinkage that are characteristic of dynamic instability, Alp7A-GFP filaments can also treadmill. We observed treadmilling only in fully elongated filaments. Plasmid foci were present at the ends of these filaments, suggesting that treadmilling occurs after plasmid separation.

### Example 12

### Modulation of the ALP7 Stability System for Limited Stability

[0126] The stability conferred by the ALP7 orf can be reduced so that a mobile genetic element (e.g., plasmid) can be retained for a limited amount of time. This can be useful where expression of a recombinant protein is not desired beyond a certain timeframe. In particular, two substitutions in the ALP7A protein can provide either rapid, or slow loss of plasmid stability.

[0127] FIG. 10 shows the effect of the two ALP7A point mutations, where the proteins are expressed in the minipLS20 plasmid. As shown above, minipLS20 expressing wild type ALP7AR is stably maintained for more than 30 generations. FIG. 10A shows that ALP7A(D218N) results in nearly the same level of stability as the plasmid lacking the ALP7 stability system (knockout). Substitution of the aspartic acid at 219, however, results in a slower loss of stability. ALP7A(D219N) is maintained at closer to wild type levels (FIG. 10B).

### Example 13

### Use of the ALP7A Stability System to Confer Competence in Bacteria

[0128] In the commonly used laboratory strain Bacillus subtilis 168, competence requires the expression of a set of corn genes whose products assemble into a complex in the inner membrane that actively translocates DNA into the cell. Expression of the corn genes is under the control of the transcription factor ComK, and cells become competent when ComK accumulates in the cells. Many strains of Bacillus have been identified that contain all of the corn genes necessary for competence, but the signals necessary to express the genes are unknown. The expression of the B. subtilis ComK protein in these untransformable strains is sufficient to make them competent. But because these strains are untransformable, it is always very difficult if not impossible to introduce a ComK expression plasmid into these strains.

[0129] We developed a general strategy to genetically manipulate strains of Bacillus that relies upon the ability to activate the competence pathway in these bacteria. The strategy employs a novel plasmid that:
[0130] can replicate in most strains of Bacillus;
[0131] is stably inherited based on expression of an ALP stability system;
[0132] can be easily transferred into untransformable strains of Bacillus by conjugation;
[0133] expresses the comK gene so as to enable the Bacillus strains to become competent to take up DNA.

[0134] Currently the only methods for introducing plasmid DNA into untransformable Bacillus strains are electroporation, protoplast transformation, and conjugation, each which has serious drawbacks. Electroporation is rarely successful with Bacillus. Protoplast transformation is difficult, unreliable, and inefficient. Conjugation requires that the plasmid DNA contain a mobilization region comprising an origin of transfer. None of these methods can be use to introduce chromosomal mutations. Chromosomal mutations can be moved from one strain to another by bacteriophage-mediated transduction, but transduction cannot be used to generate new mutations on the chromosome and can be used only with a few strains of Bacillus for which phage capable of transducing DNA have been identified.

[0135] The strategy for conferring competence in untransformable bacteria utilizes a plasmid with the following components. The comK gene is expressed from the xylose inducible promoter. The plasmid contains a mobilization region comprising an origin of transfer, allowing it to be mobilized via conjugation. Any mobilization region can be used, as these are promiscuously active in bacteria. Once the plasmid is transferred into the recipient strain, natural competence can be activated by the addition of xylose to the media.

[0136] This general system allows many species of Bacillus of industrial importance to be rendered competent and therefore easily manipulated genetically. Our results show that the stable comK system works in B. subtilis, B. megaterium, B. amyloliquefaceins, B. thuringiensis, B. licheniformis, B. sphericus, B. anthracis, and B. cereus. Other related Bacillus species are expected to be rendered transformable using the same competence system.

[0137] In some strains of Bacillus, functional corn genes may not be present; we have also designed a variant plasmid that expresses from the xylose promoter all of the corn genes known to be required for DNA uptake. This plasmid can thus be used for making any bacterial strain competent to take up DNA.

[0138] The comK plasmid is stably inherited in Bacillus subtilis in the absence of antibiotic selection. The pUB110 mobilization region was added so that the plasmid can be mobilized by conjugation. The plasmid vector can replicate in both E. coli and Bacillus, allowing easy genetic manipulation.

[0139] The comK gene from B. subtilis PY79 was cloned into the pBEV1 expression vector under control of the xylose promoter. In the absence of xylose the comK gene is repressed. In the presence of xylose, the comK gene is expressed. Expression of ComK turns on corn genes involved in DNA uptake, such as the comF and comG genes. Two different assays were used to determine if the plasmid expressing ComK induced genetic competence. First, we examined expression of comF-lacZ and comG-lacZ fusions upon expression of ComK from the pBEV1 plasmid. Second, we measured the ability of Bacillus cells to take up exogenously added plasmid DNA.

[0140] The plasmid was introduced by transformation into PY79 cells containing fusions of lacZ to the comF or comG genes. These gene are required for competence, and expressed in response to comK. pBEV1 vector alone (no comK) and plasmid pWH1520 (no comK or alp7AR plasmid stabilization system) were used as negative controls. Upon induction of comK expression with xylose, the colonies of the reporter strains appeared blue, indicating that expression of B. subtilis comK from pBEV1 is sufficient to induce expression of competence genes. The negative control cells did not show the blue lacZ coloration.

[0141] Xylose was added to exponential phase cultures of PY79 containing pBEV1 or pBEV1-comK for 45 min, the cells were pelleted and resuspended in a small quantity of the growth medium, and 5 ug of plasmid pHCMC04 were added to the suspensions. After brief incubation at 30C, the cells were spread onto plates containing the selective antibiotic for pHCMC04. Thus, the cells that were not transformed with pHCMC04 would not grow to develop colonies. The plates were incubated overnight at 30C. The strain containing pBEV1-comK gave rise to several thousand colonies, whereas the strain containing pBEV1 alone gave rise to fewer than 50 colonies, indicating that the induction of comK from pBEV1-comK leads to the development of genetic competence.

[0142] It is understood that the examples and embodiments described herein are for illustrative purposes only and that various modifications or changes in light thereof will be suggested to persons skilled in the art and are to be included within the spirit and purview of this application and scope of the appended claims. All publications, patents, and patent applications cited herein are hereby incorporated by reference in their entirety for all purposes.

### VI. Informal Sequence Listing

Alp7A from pLS20 Bacillus subtilis
(SEQ ID NO: 1)
MNISRMNVDFGNSMYMNLIDGYFFELPTNVVEISKEAAEGKFTSIVEDPADLKDRLLVS
TVIDETERYFLVGELAEPEVLGNQHIKKLHNKVESHIPYVTFLAATAYYQALKGKREDN
EVTIEYFQTMLPIWLLKKLDKFSEMQKRMASKFLGTHQVKVLTLGLEKELTIKVEDAAC
RIESEVARWAIKKNFDLEDKDYAEQFKNYDVVFCDLGGGTDDLVLLPAGLKPPKSRDSF
VSNTEAPFLAHLEKLRKEKLLEHFDSVRELEKFIYSNIGKTKMERRDGNTGQKFDLTDII
KKSLKEYTEIKIAQAENTFPAPKDKVYKYLYFGGVGEVLEESISVVTEERYGRDISESNHI
VAEDARLLNLYGLEVLSRAEQVKKQANEKEAQSI
Alp7 gi|75758323 [Bthuringiensis serovar israelensis ATCC 35646]
(SEQ ID NO: 2)
MKITMMNKDSGNSLDMNLIDGFYIETPTNVVEISKDEADSHFVATITNPKELLSRLLISTT
IPGEDTERFFLVGDEAGKHALANNHVNKLHDKITSPIPYVMFLSAVSFYHAINETRESDD
NTVEIEYFQTMLPIWLLKRTAKFSEAQNAMAERFAGEHEVTIHTPGMEKTLKITVEKAT
CRIEGEIARLAIKKNFELEDREEARQFDNNDTVLVDIGGGTIDLVLSPAGLKSPKNRDSM
QPIDKLSYLSHIEKLRKEKFLEKFSDLRSFETFIVNNFQKPKMELVDGNTGQRVDLTDKIR
SSLKEFAKFLILKIQDVMPAPADKVYKYVYFGGVAPILETSIHEVIEEMYGAEIAQANHIF
LPDSRKLNLYGLEVKSRGEMLQKTEK
Alp7 pBM400_p39 [Bacillus megaterium]
(SEQ ID NO: 3)
MRCIDMKISRFNKDCGNSVDMNIIDGYLFDFPTNVVELQKEAADSFFTDAVTAPEEFKK
RILLSTTIGDEEKERYFLVGDIAASQQLANNHINRLHNKITSHIPYVTFLAAIAYYNALHA
KDQKDTSIEIDYFSTMLPIWLLKKESTFGEAQKAMANRFVGDHTFHIHTPGFERELKVSV
EESSCLKEGEIARFALKKDLTLQDREDANEYVECETVMVDIGGGSIDVVILPEGLKAANS
RESFQSIEGIPYLAHIDKLRKEKFPELFTDLRAFDQFILDNYNKQKFELKNENTGESIDLTV
QIKSSLKEYVEILLAKLNDVAPPPANKLRKYVYCGGVAPTLEVAIMNSMGEKIGEERTE
KYHKVPET
Alp7 pFR55_ORF058gi|166091597|[Bacillus thuringiensis]
(SEQ ID NO: 4)
MKIGRKVADFGNSFNNFTVDGYYFELATNVVKVSKKKAEDLLVERILNPEDLLDRLLIS
TEIDGEESYYVLGQLAEDNQLANSHVNKMHDKIKSPIPYISFLGAIAYYHALNADKEDD
EVEIDYMSMMLPIWLLKREEKFSIAHKMMEQRFIGEHKVKVLTPGMERELTITVNSAKC
RNESEIARHSLKYKMVAKDKNSNVISIEKRLEAEKFDDFEVVLTDIGGGSTDAVRLGKG
LTTPKHRDSFQVIDIEPFLGYIDRFRKEKVLQYFKDLRTLETFIVKNYKDQEYVLIDENTG
QEHDFTSEIVEALQEYAKILVAKVLDVFIPSSTNTVLKFIYIGGEAPVLEPYIRLALLEHM
NETAAKNNHFFLSDIIKHDEKEIFAPTSRTINLAALELKAIDETKEQLA
Alp7 pSOL1CAP0126 gi|15004829|[Clostridium acetobutylicum]
(SEQ ID NO: 5)
MNIKRFNADFGNSTGNFLIDGYYFEIPTNIVEISSKKAEGMFVSPITEKNELLDRLMISTGE
KENEKFYLVGEFAQGHEIKTHVNQMNDKLTSIIPYANFLGAVAYYAILKNPSEEKEINVE
IDNMKMMLPIWILKKASKFSVAQNQMAARFLGEHTVKVLTMGMERIIKIKVNNSVCKIE
SEVARYAIKYKMVQEDKIIKILPRANLSDKFTKCETVLCDFGGGSIDCVKLGEGLTPPKA
RDSFKVIDIEPFLGWLETFRKEKVLQYFYSIKQIEKFLINNYKKQKYILEDPNTGKSYDFT
SKFTEMLQDYSDKLVPVIFNTFKETDRLLKFVYFGGESPVLKPYIKKTLLKFVTEKVAEE
NHIFLDDLLENDTSEVFKPTSRTINLTALELLSISEVTKNKSSEKNE
ALP7 gi|229168012|ref|ZP_04295742.1|hypothetical protein
bcere0007_29710 [Bacillus cereus AH621]
(SEQ ID NO: 6)
MKINMMNKDSGNSLDMNLIDGFYIETPTNVVEISKDEADSHFVATITNPKELLSRLLISTT
IPGEDTERFFLVGDEAAKHALANNHVNKLHDKITSPIPYVMFLSAISFYHAINEQRESDD
NTIEIEYFQTMLPIWLLKRTAKFSEAQNAMAERFAGEHEVTIHTPGMEKTLKITVEKATC
RIEGEIARLAIKKNFELEDREEASQFDNNDTVLVDIGGGTIDLVLSPVGLKSPKNRDSMQP
IDKLSYLSHIEKLRKEKFLEKFSDLRSFETFIVNNFQKPKMELVDGNTGQRVDLTDKVRS
SLKEFAKFLILKIQDVMPAPADKVYKYVYFGGVAPILEASIHEVIEEMYGAEIAQANHIFL
PDSRKLNLYGLEVKSRGEMLQKTEK
ALP7 gi|229141745|ref|ZP_04270274.1|hypothetical protein
bcere0013_48340 [Bacillus cereus BDRD-ST26]
(SEQ ID NO: 7)
MMNKDSGNSLDMNLIDGFYIETPTNVVEISKDEADSHFVATITNPKELLSRLLISTTIPGE
DTERFFLVGDEAGKHALANNHVNKLHDKITSPIPYVMFLSAVSFYHAINETRESDDNTV
EIEYFQTMLPIWLLKRTAKFSEAQNAMAERFAGEHEVTIHTPGMEKTLKITVEKATCRIE
GEIARLAIKKNFELEDREEARQFDNNDTVLVDIGGGTIDLVLSPAGLKSPKNRDSMQPID
KLSYLSHIEKLRKEKFLEKFSDLRSFETFIVNNFQKPKMELVDGNTGQRVDLTEKIRSSLK
EFAKFLILKIQDVMPAPADKVYKYVYFGGVAPILETSIHEVIEEMYGAEIAQANHIFLPDS
RKLNLYGLEVKSRGEMLQKTEK
ALP7 gi|229100588|ref|ZP_04231438.1|hypothetical protein
bcere0020_57600 [Bacillus cereus Rock3-29]
(SEQ ID NO: 8)
MKITMMNKDSGNSLDMNLIDGFYIETPTNVVEISKDEADSHFVATITNPKELLSRLLISTK
IPGEDTERFFLVGDEAAKHALANNHVNKLHDKITSPIPYVMFLSAVSFYHAINEQRESDD
NTIEIEYFQTMLPIWLLKRTAKFSEAQNAMAERFAGEHEVTIHTPGMEKTLKITVEKATC
RIEGEIARLAIKKNFELEDREEARQFDNNDTVLVDIGGGTIDLVLSPTGLKSPKNRDSMQP
IDKLSYLSHIEKLRKEKFLEKFSDLRSFETFIVNNFQKPKMELVDGNTGQRVDLTDKVRS
SLKEFAKFLILKIQDVMPAPADKVYKYVYFGGVAPILETSIHEVIEEMYGAEIAQANHIFL
PDSRKLNLYGLEVKSRGEMLQKIER
ALP7 gi|229082948|ref|ZP_04215369.1|hypothetical protein
bcere0023_55370 [Bacillus cereus Rock4-2]
(SEQ ID NO: 9)
MNLIDGFYIETPTNVVEISKDEADSHFVATITNPKELLSRLLISTTIPGEDTERFFLVGDEA
GKHALANNHVNKLHDKITSPIPYVMFLSAISFYHAINETRESDDNTIEIEYFQTMLPIWLL
KRTAKFSEAQNAMAERFAGEHEVTIHTPGMEKTLKITVERATCRIEGEIARLAIKKNFEL
EDREEARQFDNNDTVLVDIGGGTIDLVLSPAGLKSPKNRDSMQPIDKLSYLSHIEKLRKE
KFLEKFSDLRSFETFIVNNFQKPKMELIDGNTGQRVDLTDKIRSSLKEFAKFLILKIQDVM
PAPADKVYKYVYFGGVAPILETSIHEVIEEMYGAEIAQANHIFLPDSRKLNLYGLEVKSR
GEMLQKTEK
ALP7 gi|229009322|ref|ZP_04166606.1|hypothetical protein
bmyco0002_60080 [Bacillus mycoides Rock1-4]
(SEQ ID NO: 10)
MKIGRKVADFGNSFNNFMVDGYYIELATNVVKISKKKAEDLLVDRISRPEDLLDRLLIST
EIDGEESFYLVGQLAEDNQLANSHVNKMHDKINSPIPYISFLGAIAYYHALNAEQEDNVV
EIENMSMMLPIWLLKREEKFSIAHKKMEERFTGEHKVKVLTPGMERELTITVNSAKCKN
ESEVARHSLKYKMVSKDKNTSVISIEKRYESERFDDYEVVLTDIGGGSTDAVRLGKGLT
TPKHRDSFQVIDVEPFLGYLERFRKEKLIQYFKDLRTLEKFIVNNYKEQKYVLSNENTGE
EYDFTTEIVEALKEYARILVAKVLDVFIPSSTNTVLKFIYIGGEAPVLEPYIRLALLDHMSE
TAAKNNHFFLNDIIQNSEKEVFAPTSRTINLAALELKAIDEMKGQLA
ALP7 gi|228994350|ref|ZP_04154236.1|hypothetical protein
bpmyx0001_50640 [Bacillus pseudomycoides DSM 12442]
(SEQ ID NO: 11)
MKIGRKVADFGNSFNNFMVDGYYIELATNVVKISKKQAEDLLVDRISRPEDLLDRLLIST
EIEGEESFYLVGQLAEDNQLANSHVNKMHDKINSPIPYVSFLGAIAYYHALNAEQEDNE
VEIEHMSMMLPIWLLKREEKFSIAHKKMEERFIGEHKVKVLTPGMEKELTIRVNSAKCR
NESEVARHSLKYKMVSKDQNTNVISIEKRYESERFDDYEVVLTDIGGGSTDAVRLGKGL
TTPKHRDSFQVIDIEPFLGYLERFRKEKLIQYFKDLRTLEKFIVNNYKVQKYVLSNENTGE
EYDFTNEIVEALKEYARILVAKILDVFIPSSTNTVLKFIYIGGEAPVLEPYIRLALLNHMSE
MAAKNNHFFLNDIIQNSDKEVFAPTSRTINLTALELKVIDEMKGQLA
ALP7 gi|228962224|ref|ZP_04123662.1|hypothetical protein
bthur0005_55780 [Bacillus thuringiensi sserovar pakistani str.
T13001]
(SEQ ID NO: 12)
MMNKDAGNSLDMNLIDGFYIETPTNVVEISKDEANSHFVATITNPKELLSRLLISTTIPEE
DTERFFLVGDEASKHALANNHVNKLHDKTTSPIPYIMFLSAISFYHAINETRESDENTIEIE
YFQTMLPIWLLKRTAKFSEAQHAMAARFTGEHEVTIHTPGMEKTLKIIVEKAICRIEGEIA
RLAIKKNFELEDREEARQFDDNDTVLVDIGGGTIDLVLSPAGLKSPKNRDSMQPIDKLSY
LSHIEKLRKEKFLEKFSDLRSFETFIVNNYQKPKMELVDGNTGQRIDLTEKIQSSLKEFAR
FLILKIQDVIPAPSDKVYKYVYFGGVAPILKTNIHEVIEEMYGAEIAQANHIFLPDSRKLN
LYGLEIKSRGEMLQKTKK
ALP7 gi|228936872|ref|ZP_04099626.1|hypothetical protein
bthur0009_52840 [Bacillus thuringiensi sserovar andalousiensis BGSC
4AW1]
(SEQ ID NO: 13)
MKINMMNKDSGNSLDMNLIDGFYIETPTNVVEISRDEADSHFVASITNPKELLSRLLISTT
IPGEDNERFFLVGDEAAKHALANNHVNKLHDKITSPIPYIMFLSAISFYHAINEQREPDDN
TVEIKYFQTMLPIWLLKRTAKFSEAQNAMAERFAGEHEVTIHTPGMGKTLKITVEKATC
RIEGEIARLAIKKNFELEDREEARQFDNNDTVLVDIGGGTIDLVLSPAGLKSPKNRDSMQ
SIDKLSYLSHIEKLRKEKFLEKFSDLRSFETFIVNNFQKPKMELIDGNTGQRIDLTDKLRSS
LKEFAKFLILKIQDVMPAPADKIYKYVYFGGVAPILETSIHEVIEEMYGTEIAQANHIFLP
DSRKLNLYGLEVKSRGEILQKTEN
ALP7 gi|228905653|ref|ZP_04069581.1|hypothetical protein
bthur0014_66980 [Bacillus thuringiensis IBL 4222]
(SEQ ID NO: 14)
MMNKDSGNSLDMNLIDGFYIETPINVVEISKDEADSHFVATITNPKELLSRLLISTTIPGE
DTERFFLVGDEAGKHALANNHVNKLHDKITSPIPYVMFLSAVSFYHAINETRESDDNTV
EIEYFQTMLPIWLLKRTAKFSEAQNAMAERFAGEHEVTIHTPGMEKTLKITVEKATCRIE
GEIARLAIKKNFELEDREEARQFDNNDTVLVDIGGGTIDLVLSPAGLKSPKNRDSMQPID
KLSYLSHIEKLRKEKFLEKFSDLRSFETFIVNNFQKPKMELVDGNTGQRVDLTDKIRSSL
KEFAKFLILKIQDVMPAPADKVYKYVYFGGVAPILETSIHEVIEEMYGAEIAQANHIFLPD
SRKLNLYGLEVKSRGEMLQKTEK
Alp5 mamK [Magnetospirillum gryphiswaldense]
(SEQ ID NO: 15)
MWIDLLARERSDKMSEGEGQAKNRLFLGIDLGTSHTAVMTSRGKKFLLKSVVGYPKDV
IGLKLLGRPYVVGDEAFEMRSYLDLRYPLQDGVLSEISDRDIEVARHLLTHVVKSAEPG
ANDEICAVIGVPARASGANKALLLKMAQEVVHTALVVSEPFMVGYGLDKLNNTIIVDIG
AGTTDICALKGTVPGPEDQVTLTKAGNYLDERLQNAILERHPELQMNTNVACAVKEQF
SFVGARGEAATFEFRAAGKPVRCDVTESVKIACEALMPDIIESIEILLRSFQPEYQATVLQ
NIVFAGGGSRIRGLAAYVKDKLRPFGNADVTCVKDPTFDGCRGALRLAEELPPQYWCQ
LGDVSGQ
Alp5 [Magnetospirillum magneticum AMB-1]
(SEQ ID NO: 16)
MSEGEGQAKNRLFLGIDLGTSHTAVMSSRGKKFLLKSVVGYPKDVIGLKLLGRPYVVG
DEAFEMRSYLDIRYPLQDGVLSEISDRDIEVARHLLTHVVKSAEPGPNDEICAVIGVPAR
ASAANKALLLKMAQEVVHTALVVSEPFMVGYGLDKLINTIIVDIGAGTTDICALKGTVP
GPEDQVTLTKAGNYVDERLQNAILERHPELQMNVNVACAVKEQFSFVGTPTEVASFEF
RAAGKPVRADVTEPVKIACEALMPDIIESIETLLRSFQPEYQATVLQNIVFAGGGSRIRGL
AAYVKEKLRPFGDANVTCVKDPTFDGCRGALRLAEELPPQYWRQLGDVSGS
Alp5b [Magnetospirillum magnetotacticum MS-1]
(SEQ ID NO: 17)
MSSRGKKFLLKSVVGYPKDVIGLKLLGRPYVVGDEAFEMRSYLDIRYPLQDGVLSEISD
RDIEVARHLLTHVVKSAEPGPNDEICAVIGVPARASAANKALLLKMAQEVVHTALVVSE
PFMVGYGLDKLINTIIVDIGAGTTDICALKGTVPGPEDQVTLTKAGNYVDERLQNAILER
HPELQMNVNVACAVKEQFSFVGTPTEVASFEFRAAGKPVRADVTEPVKIACEALMPDII
ESIETLLRSFQPEYQATVLQNIVFAGGGSRIRGLAAYVKEKLRPFGDANVTCVKDPTFDG
CRGALRLAEELPPQYWRQLGDVSGS
Alp5 [Magnetococcus sp. MC-1]
(SEQ ID NO: 28)
MQSPAGNDKQLFVGIDLGTSRTAIMTRRGVKTMVRSVVGYPKDIIGVKILNNTVVIGQE
ALDNQAYLNLYYPLADGVLKETSEKDEMAAKELLKYVISQAKPQGDEQILGIVGVPAR
TSIYNKSQLLKITDDLMSMSMVVSEPFMVAYGLDKLNNAIIIDIGAGTIDICAMKGTVPS
DKDQITLLKGGNYVDEVFTHAIAESYPDVQITSYIAQKIKEKHGFVGEPTEEVVVNLRAG
GKPMLHDVTRELRFACETIIPDILESVEKLVLSFDPDNQQEALKNIILAGGGSNLIGLDTV
LTEGLKEYGKVNVSRVADPDFAGAAGALKLATELPTEYWNQVGDIVGG
Alp5w [delta proteobacteriumMLMS-1]
(SEQ ID NO: 19)
MALADDEQVNDEINETASAIDDNPAPATDQPEFPAEVERPTPAGGGEQVTVGIDLGTCR
TVVITDHGQEFEIRSVVGYPKDVISRQAVGDGPIFGAEALDKRNFLELCSPLAEGVVREA
SERDYRAARELIHHLIDLVRAGNPGVRVNGVIGVPARASLMNKEVLLGVAREVMDRAL
VVSEPFMVAYALGRLNRAIIVDIGAGTVDICGVKGSLPAAEDQVTTFKGGDYLDERLEA
AIIRRHPGAQVTHSLACRLKEEHAFVGEPEKPVEVTLRVEGKPVQFDITDEMRTICESMV
PNIIEQLEVLIASFDPEDQEEVLRHIYLAGGGSRIRGLDAMIARGLREYGEVRVTRVDDPE
RIGAIGALKLAREIPTNQWAQVGLMFGG
Alp5 [deltaproteobacteriumMLMS-1]
(SEQ ID NO: 20)
MSETEAEDRPLLLGIDLGVARTAVVSNRGARHLLDSVVGYPRDIIALKTLGAPQIFGARA
LEHKAALTLYHPLGDGTIAQDRRRDYNAAGELLRHVIELATNSAPPRANVTDHGVHGV
SGHGGPQAAASETAMRTSVPEPARSPLSAVPRDRLRVSGVIAVPATFGAGGRQTLATIA
GELLADFLIIEQPLPVAYYLGRLDNSLLIDIGAGSISLCPCRGRLPNPNERVTLPKGGDSLD
QRLQALISQRYPEVQITRELARQIKEEHAHVGTSPRPVLVTLRAAGKPRQYELSEELRLV
CQGLVPEIAEKLAAIIHEFDPEDLDEVLQNIYLTGGGAQIHGLDTALADALADYGQVRIK
ILDDPEYAGALGALRLAEELPPQRWHDSGFT
Alp5b [delta proteobacteriumMLMS-1]
(SEQ ID NO: 21)
MSETEAEDRPLLLGIDLGVARTAVVSNRGARHLLDSVVGYPRDIIALKTLGAPQIFGARA
LEHKAALTLYHPLGDGTIAQDRRRDYNAAGELLRHVIELATNSAPPRANVTDHGVHGG
PQVAASESAMRTSVPEPARSPLSAVPRDRLRVSGVIAVPATFGAGGRQTLATIAGELLAD
FLIIEQPLPVAYYLGRLDNSLLIDIGAGSISLCPCRGRLPNPNERVILPKGGDSLDQRLQAL
ISQRYPEVQITRELARQIKEEHAHVGTSPRPVLVTLRAAGKPRQYELSEELRLVCQGLVP
EIAEKLAAIIHEFDPEDLDEVLQNIYLTGGGAHIHGLDTALADALADYGQVRIKILDDPEY
AGALGALRLAEELPPQRWHDSGFT
Alp5c [delta proteobacteriumMLMS-1]
(SEQ ID NO: 22)
MNKEVLLGVAREVMDRALVVSEPFMVAYALGRLNRAIIVDIGAGTVDICGVKGSLPAA
EDQVTTFKGGDYLDERLEAAIIRRHPGAQVTHSLACRLKEEHAFVGEPEKPVEVTLRVE
GKPVQFDITDEMRTICESMVPNIIEQLEVLIASFDPEDQEEVLRHIYLAGGGSRIRGLDAMI
ARGLREYGEVRVTRVDDPERIGAIGALKLAREIPTNQWAQVGLMFGG
Alp7 gp207gi|156564188 [Bacillus phage 0305phi8-36]
(SEQ ID NO: 23)
MYIFGCDIGFKQFKGINLEDDIEFKFPNIIGFPTSLEIQNATDHGETMKDLWLTYDDETYY
VGDKASEFATNHRYTFLANKVDTIDETVKLLTGLGLLYETGQNKIDLMVTGVPVEEYFL
VKDKIETEFVRDYDYSFRGRKCRSTIQKVVVVPQGAGDYYDYILDESGQVITERVKPKT
VIVNIGYRTTEIVTMNNGRFSRSESTTLYTATNNFHKELRRLLAKEYGIRKNLTQIDEIYR
ERKVYIKGIATDISELITSAIDMHVGSISGEIPVWVNPDDVHEILLTGGGSTGLTPFFQSQF
GDIILKHDNPEFGNARGFAKYGRLIAHG
Alp8 orf250 [Proteus vulgaris]
(SEQ ID NO: 24)
MELLRKGRSFGGLFLIKGKVMNQSERFIVGLDIGYSNVKVACGGTQLLDPKVTIFPAYA
TPEPESDLALAKKSPDEVKVYPNGTEWRVFTNRVGHRELHESYHSTEMYKALFYGALI
KATEGRSDVIDILVTGLPVRIANSEADRSQLCESFTGKHEVTPGRFILVKEVVVLSQGVGI
MNDILNTEGLISDEDLEFSNILVIDPGYYSMDYVTFHRGDKKNEFSGSSLNATSVIIEEIVR
VLERDYPKEGAQETERIETALRLGNKTFNNGFRSVEIEPLIEEVSHRIVSSVVAELLKRTR
SIGPVHIIISAGGGARFYDHFIKEAFPQARILQSVNPVASNSIGYWHYGVNKLSSQSD
Alp8 pCAR1_p156 [Pseudomonas resinovorans]
(SEQ ID NO: 25)
MQLQRLGFCRCGVSCVAGSSASSFGALLLSFFAGSGIRMGNALGLDIGYSNVIGVFGSG
DGQPESIIRPSQAAPLSVLPGDSGLRPGEVIVEVDGAPWVAFAAPGRVQDGRELHEDYTS
SHAYEALFKGALLHAAGDKDVIDCLVTGLPVSQARDKPYVEALIKRMTGTHRITPKREV
TVKRVEVVAQPIGTLTEIYCNSDASEVIEESVSIIIDPGFFSVDWVVFDHRELVVNSSSSSL
KAMSVVLEACNEEIAKDHGGIPGVEKIEHALQSGKSYILIYGRKVELAEYLERAAERVIP
SVFTEIKQGLRFLKGRAIDCVILGGGGASLYEPFARKEFPDALVVKPVNSVKSNAEGFW
HIARS
Alp8 pYR1_0185 [Yersinia ruckeri]
(SEQ ID NO: 26)
YR71MSQFVLGLDIGYSNLKMAMGHKGEEARTVVMPVGAGPLELMPQQLTGGAGASI
QVVIDGEKWVAGVEPDRLQGWERELHGDYPSTNPYKALFYAALLMSEQKEIDVLVTGL
PVSQYMEVERREALKARLEGEHQITPKRSVAVKSVVVVPQPAGAYMDVVSSTKDEDLL
EIIQGGKTVVIDPGFFSVDWVALEEGEVRYHSSGTSLKAMSVLLQETDRLIQEDHGGAPG
IEKIEKAIRAGKAEIFLYGEKVSIKDYFKKASTKVAQNALIPMRKSMREDGMDADVVLL
AGGGAEAYQDAAKELFPKSRIVLPNESVASNARGFWFCG
Alp8 P91278ORF_129 [Photobacterium damselae subsp. piscicida]
(SEQ ID NO: 27)
MSQFVLGLDIGYSNLKMAMGYKGEEARTVVMPVGAGPLELMPQQLTGGAGTCIQVVI
DGEKWVAGVEPDRLQGWERELHGDYPSTNPYKALFYAALLMSEQKEIDVLVTGLPVSQ
YMDVERREALKSRLEGEHQITPKRSVAVKSVVVVPQPAGAYMDVVSSTKDEDLLEIIQG
GKTVVIDPGFFSVDWVALEEGEVRYHSSGTSLKAMSVLLQETDRLIQEDHGGAPGIEKIE
KAIRAGKAEIFLYGEKVSIKDYFKKASTKVAQNALIPMRKSMREDGMDADVVLLAGGG
AEAYQDAAKELFPKSRIVLPNESVASNARGFWFCG
Alp8 Sputw3181_1079 [Shewanella sp. W3-18-1]
(SEQ ID NO: 28)
MFVLGVDIGYSNLKLAIGQSGSEPKTIILPAGAGPADRMPERIGGGDDETCLYVSVDNER
WAAGVPAGRLQGWERELHPEYPTTKTYKALFHAALLMAETESIDLVVTGLPVSQFHEP
QRKSDLVQRLKGVHQVTPKRSITVHDVKVLPQPAGAYMDLVQTGGDLGLIEEGRVVVI
DPGFFSVDWVALEAGEIRYSSSGTSLQAMSVLLETIDKLISEDHGAKVGMDRLEKAMRT
GDLQVLLFGEKVDISPYLNAATKKVAPIALTAMRQSMRDESINADLVLIAGGGALAYKE
AAKEIFSRSKIIVPEQSVLANVRGFWFYGA
Alp8 [Vibrio cholerae]
(SEQ ID NO: 29)
MFVLGVDIGYSNLKLAIGQSGSEPKTIILPAGAGPADRMPERIGGGDDETCLYVSVDNER
WAAGVPAGRLQGWERELHPEYPTTKTYKALFHAALLMAETESIDLVVTGLPVSQFHEP
QRKSDLVQRLKGVHQVTPKRSITVHDVKVLPQPAGAYMDLVQTGGDLGLIEEGRVVVI
DPGFFSVDWVALEAGEIRYSSSGTSLQAMSVLLETIDKLISEDHGAKVGMDRLEKAMRT
GDLQVLLFGEKVDISPYLNAAMKKVAPVALTAMRQSMRDESINADLVLIAGGGAMAY
KEAAKEIFSRSKIIVPEQSVLANVRGFWFYGA
Alp8 [Vibrio cholerae B33]
(SEQ ID NO: 30)
MFVLGVDIGYSNLKLAIGQSGSEPKTIILPAGAGPADRMPERIGGGDDETCLYVSVDNER
WAAGVPAGRLQGWERELHPEYPTTKTYKALFHAALLMAETESIDLVVTGLPVSQFHEP
QRKSDLVQRLKGVHQVTPKRSITVHDVKVLPQPAGAYMDLVQTGGDLGLIEEGRVVVI
DPGFFSVDWVALEAGEIRYSSSGTSLQAMSVLLETIDKLISEDHGAKVGMDRLEKAMRT
GDLQVLLFGEKVDISPYLNAAMKKVAPVALTAMRQSMRDESINADLVLIAGGGALAYK
EAAKEIFSRSKIIVPEQSVLANVRGFWFYGA
Alp8 VchoM_02002592 [Vibrio cholerae MO10]
(SEQ ID NO: 31)
MFVLGVDIGYSNLKLAIGQSGSEPKTIILPAGAGPADRMPERIGGGDDETCLYVSVDNER
WAAGVPAGRLQGWERELHPEYPTTKTYKALFHAALLMAETESIDLVVTGLPVSQFHEP
QRKSDLVKRLKGVHQVTPKRSITVHDVKVLPQPAGAYMDLVQTGGDLGLIEEGRVVVI
DPGFFSVDWVALEAGEIRYSSSGTSLQAMSVLLETIDKLISEDHGAKVGMDRLEKAMRT
GDLQVLLFGEKVDISPYLNAAMKKVAPVALTAMRQSMRDESINADLVLIAGGGAMAY
KEAAKEIFSRSKIIVPEQSVLANVRGFWFYGA
Alp8b [Vibrio cholerae MZO-3]
(SEQ ID NO: 32)
MFVLGVDIGYSNLKLAIGQSGSEPKTIILPAGAGPADRMPERIGGGDDETCLYVSVDNER
WAAGVPAGRLQGWERELHPEYPTTKTYKALFHAALLMAETESIDLVVTGLPVSQFHEP
QRKSDLVKRLKGVHQVTPKRSITVHDVKVLPQPAGAYMDLVQTGRDLGLIEEGRVVVI
DPGFFSVDWVALEAGEIRYSSSGTSLQAMSVLLETIDKLISEDHGAKVGMDRLEKAMRT
GDLQVLLFGEKVDISPYLNAAMKKVAPVALTAMRQSMRDESINTDLVLIAGGGALAYK
EAAKEIFSRSKIIVPEQSVLANVRGFWFYGA
Alp8 ASA_P4G053 [Aeromonas salmonicida subsp. salmonicida A449]
(SEQ ID NO: 33)
MKQFILGLDIGYSNLKIAMGFKGGHVTTTVLPVGAGPLALMPQQLTGGEGNCIQIVIDDE
KWVAGVEPDRLQGWNRELHDDYPATKPYKALFYAALLLSEQKEIDVLVTGLPVSQFM
NPELREALKKRLEGEHQITLKRSVTVKSVVVVPQPAGAYMDIVSSTKDEGLLEVLREGK
TVVIDPGFFSVDWVALEEGEVRYHSSGTSLKAMSVLLKTINLLIQEEHGGSPGIDKIEKAI
RSGKNEILLFGQKVGLKEYLDRESFNVAQNALIQMRTSMREDGMDADVVLLAGGGAE
AYKAAAKARIQLRSATLAYAA
Alp9 gi|47564291|[Bacillus cereus G9241]
(SEQ ID NO: 34)
MKSLYAIDVGIGFTKRAYRQDVDSEVTIKSEASTLAPIPNHAESEDLTKVSFIDLDFAYY
MGNEAHQSDASFLPPFDEEIENYYESEQFKQQIFGCIAKDYKENVVLPLVVTGLPVTDFG
SQHEQLQRALKKETSVQIDGKFITITVENVLILQQPVALHAYFLKEGIIQEQDRILIIDGGF
RTLEMTDMKQNVILNHYETELGCSKPLKNIKNILQNHAGESNQLHINDMPNILEKGYGG
REENPQTSQVHTLIQKELDAHFQDVMRVLQEQFKLEQYDTIIWTGGIVDLHKKRIEKIQG
EISSFRMVDASKEAALHGYYMIGSQVFDDITNQSVYESKL
Alp9 gi|166981354BcerAH_03975 [Bacillus cereus AH187]
(SEQ ID NO: 35)
MKSLYAIDVGIGFTKRAYRQDVDSEVTIKSEASTLAPVPNHDESEDLTKVSFIDLDFAYY
MGNEAHQSDASLLPPFDEEIENYYESERFKQQIFGCIAKDYKENVVLPLVVTGLPVTCFG
SQHEQLQRALKKETSVQIDGKFITITVENALILQQPVALHAYFLKEGIIQERDRILIIDGGF
RTLEMTDMKQNVILNHYETELGCSKPLKNIKNIVQNHAGESNQLHINDMPNILEKGYGG
REEDPQTSQVHTLIQKELDAHFQDVMRVLQEQFKLDQYDTIIWTGGIVDLHKKRIEKIQG
EISSFRMVDASKEAALHGYYMIGSQVFDDITNQSVYESKL
Alp9 gi|118478456|BALH_2828 [Bacillus thuringiensis str. Al Hakam]
(SEQ ID NO: 36)
MKSLYAIDVGIGFTKRAYRQDEDSEVTVKSEASTLAPVPNHDESEDLTKVSFIDLDFAYY
MGNEAHQSDASFLPPFEEEIENYYESEQFKQQIFGCIAKDYKENVVLPLVVTGLPVTYFG
SQHEQLQRALKKETSVQIDGKFIHITVENALILQQPVALHAYFLKEGIIQERDRILIIDGGF
RTLEMTDMKQNVILNHYETELGCSKPLKNIKNILQNHAGESNQLHINDMPNILEKGYGG
REENPQASQVHTLIQKELDTHFQDVMCVLQEQFKLDQYDTIIWTGGIVDLHKKRIEKMQ
GEISSFRMVDASKEAALHGYYMIGSQVFDDITNQSVYESKL
Alp9 gi|42782222|BCE_3167 [Bacillus cereus ATCC 10987]
(SEQ ID NO: 37)
MKSLYAIDVGIGFTKRAYRQDVDSEVTIKSEASTLAPVPNHAESEDLTKVSFIDLDFAYY
MGNEAHQSDASFLPPFDEEIENYYESEQFKQQIFGCIAKDYKENVVLPLVVTGLPVTYFG
SQHEQLQRALKKETSVQIDGKFINITVENALILQQPVALHAYFLKEGIIQERDRILIIDGGF
RTLEMTDMKQNVILNHYETELGCSKPLKNIKNIVQNHAGESDHLHINDMPNILEKGYGD
REENPQTSQVHTLIQKELDTHFQDVIRVLQEQFKLDQYDTIIWTGGIVDLHKKRIEKMQD
EISSFRIVDASKEAALHGYYMIGSQVFDDITNQSAYESKL
Alp9 gi|52142376|BCZK2867 [Bacillus cereus E33L]
(SEQ ID NO: 38)
MKSLYAIDVGIGFTKRAYRQDEDSEVTVKSEASTLAPVPNHDESEDLTKVSFIDLDFAYY
MGNEAHQSDASFLPPFEEEIENYYESEQFKQQIFGCIAKDYKENVVLPLVVTGLPVTYFG
SQHEQLQRALKKETSVQIDGKFIHITVENALILQQPVALHAYFLKEGIIQERDRILIIDGGF
RTLEMTDMKQNVILNHYETELGCSKPLKNIKNIVQNHAGESSHLHINDMPNILEKGYGG
REEDPQTSQVDTLIQKELDAHFQDVMRVLQEQFKLDQYDTIIWTGGIVDLHKKRIEKMQ
GEISSFRMVDASKEAALHGYYMIGSQVFDDITNQSVYESKL
Alp9 BT9727_2923 [B. thuringiensis serovar konkukian str. 97-27]
(SEQ ID NO: 39)
MKSLYAIDVGIGFTKRAYRQDEDSEVTVKSEASTLAPVPNHDESEDLTKVSFIDLDFAYY
MGNEAHQSDASFLPPFEEEIENYYESEQFKQQIFGCIAKDYKENVVLPLVVTGLPVTYFG
SQHEQLQRALKKETSVQIDGKFIHITVENALILQQPVALHAYFLKEGIIQERDRILIIDGGF
RTVEMTDMKQNVILNHYETELGCSKPLKNIKNILQNHAGESNQLHINDMPNILEKGYGG
REENPQASQVDTLIQKELDTHFQDVMCVLQEQFKLDQYDTIIWTGGIVDLHKKRIEKMQ
GEISSFRMVDASKEAALHGYYMIGSQVFDDITNQSVYESKL
Alp9 BcerN_03595 gi|168153429|[Bacillus cereus NVH0597-99]
(SEQ ID NO: 40)
MKSLYAIDVGIGFTKRAYRQDEDSEVTVKSEASTLAPVPNHDESEDLTKVSFIDLDFAYY
MGNEAHQSDASFLPPFEEEIENYYESEQFKQQIFGCIAKDYKENVVLPLVVTGLPVTYFG
SQHEQLQRALKKETSVQIDGKFIHITVENALILQQPVALHAYFLKEGIIQERDRILIIDGGF
RTLEMTDMKQNVILNHYETELGCSKPLKNIKNILQNHAGESNQLHINDMPNILEKGYGG
REENPQASQVDTLIQKELDTHFQDVMCVLQEQFMLDQYDTIIWTGGIVDLHKKRIEKMQ
GEISSFRMVDASKEAALHGYYMIGSQVFDDITNQSVYESKL
Alp9 BA3174gi|30263107|[Bacillus anthracis str. Ames]
(SEQ ID NO: 41)
MKSLYAIDVGIGFTKRVYRQDEDSEVTVKSEASTLAPVPNHDESEDLTKVSFIDLDFAYY
MGNEAHQSDASFLPPFEEEIENYYESEQFKQQIFGCIAKDYKENVVLPLVVTGLPVTYFG
SQHEQLQRALKKETSVQIDGKFIHITVENALILQQPVALHAYFLKEGIIQERDRILIIDGGF
RTLEMTDMKQNVILNHYETELGCSKPLKNIKNIVQNHAGESDHLHINDMPNILEKGYGG
REEDPQTNQVHILIQKELDAHFQDVMRVLQEQFKLDQYDTIIWTGGIVDLHKKRIEKMQ
GEISSFRMVDASKEAALHGYYMIGSQVFDDITNQSVYESKL
Alp9 BcerAH1_07003gi|167935984|ref|ZP_02523059.1|hypothetical
protein [Bacillus cereus AH1134]
(SEQ ID NO: 42)
MKSLYAIDVGIGFTKRAYRQDVDSEVTIKSEAATLAPVPNHAESEDLTKVSFIDLDFAYY
MGNEAHQSDASFLPPFEEEIENYYESERFKQQIFGCIAKDYKENVVLPLVVTGLPVTCFG
SQHEQLQRALKKETSVQIDGKFIHITVENALILQQPIALHAYFLKEGIIQERDRILIIDGGFR
TLEMTDMKQNVILNHYETELGCSKPLKNIKNIVQNHEGESNQLHINDMPNILEKGYECR
EENHETSQVHTLIQKELDAHFQDVMRVLQEQFKLEQYNTIIWTGGIVDLHKKRIEKMQS
EISSFRMVDASKEAALHGYYIIGSQVFDDITNQSAYESKL
Alp9 BC3130gi|30021240|[Bacillus cereus ATCC 14579]
(SEQ ID NO: 43)
MKSLYAIDVGIGFTKRAYRQDVDSEMTIKSEASTLAPVPNHAESEDLTKVSFIDLDFAYY
MGNEAHQSDASFLPPFDEEIENYYESERFKQQIFGCIAKDYKENVVLPLVVTGLPVTCFG
SQHEQLQRALKKETSVQIDGKFIHITVENALILQQPVALHAYFLKEGIIQERDRILIIDGGF
RTVEMTDMKQNVILNHYEAELGCSKPLKNIKNIVQNHEGESNQLHINDMPNILEKGYEC
REENHETSQVHTLIQKELDAHFQDVMRVLQEQFKLEQYNTIIWTGGIVDLHKKRIEKMQ
SEISSFRMVDASKEAALHGYYIIGSQVFEDITNQSAYESKL
Alp9 BcerKBAB4_2902 gi|163940835|[Bacillus weihenstephanensis
KBAB4]
(SEQ ID NO: 44)
MKSLYAIDAGIGFTKRAYRQDVDSEMTIKSEASTLAPVPNHAESEDLTKVSFIDLDFAYY
MGNEAHQSDASFLPPFDEEIENYYESERFKQQIFGCIAKDYKENVVLPLVVTGLPVTCFG
SQHEQLQNVLKKETSVQIDGKFINITVENALILQQPVALHAYFLKEGIIQERDRILIIDGGF
RTLEMTDMKQNVILNHYETELGCSKPLKNIKNILQNHAGESNHLHINDIPKILEKGYGGR
EKNYQTSQVNTLIQKELDAHFQDVMRVLQEQFKLDQYDTIIWTGGIVDIHKKRIEKMQG
EISSFRMVDASKEAALHGYYIIGSQVFEDITNQSAYESKL
Alp9 BcerB_01640gi|168133594 [Bacillus cereus B4264]
(SEQ ID NO: 45)
MKSLYAIDVGIGFTKRAYRQDVDSEMTVKSEASTLAPVPNHAESEDLTKVSFIDLDFAY
YMGNEAHQSDASFLPPFDEEIENYYESERFKQQIFGCIAKDYKENVVLPLVVTGLPISCF
GSQHEQLQRALKKETSVQIDGKFIHIMVENALILQQPVALHAYFLKEGIIQERDRILIIDGG
FRTLEMTDMKQNLILNHYETELGCSKPLKNIKNIVQNHEGESNQLHINDMPNILEKGYEC
REENHETSQVHTLIQKELDAHFQDVMRVLQEQFKLEQYNTIIWTGGIVDLHKKRIEKMQ
SEISSFRMVDASKEAALHGYYIIGSQVFDDITNQSAYESKL
Alp9 BcerW_00980gi|167951567|BcerW_00980 [Bacillus cereus W]
(SEQ ID NO: 46)
MKSLYAIDVGIGFTKRAYRQDEDSEVTVKSEASTLAPVPNHDESEDLTKVSFIDLDFAYY
MGNEAHQSDASFLPPFEEEIENYYESEQFKQQIFGCIAKDYKENVVLPLVVTGLPVTYFG
SQHEQLQRALKKETSVQIDGKFIHITVENALILQQPVALHAYFLKEGIIQERDRILIIDGGF
RILEMTDMKQNVILNHYETELGCNKPLKNIKNIVQNHAGESNQLHINDMPNILEKGYGG
REENPQASQIDTLIQKELDTHFQDVMCVLQEQFMLDQYDTIIWTGGIVDLHKKRIKKMQ
GEISSFRMVDASKEAALHGYYMIGSQVFDDITNQSVYESKL
Alp9 BcerA_10965gi|166993800|[Bacillus cereus AH820]
(SEQ ID NO: 47)
MKSLYAIDVGIGFTKRAYRQDEDSEVTVKSEASTLAPVPNHDESEDLTKVSFIDLDFAYY
MGNEADQSDASFLPPFEEEIENYYESEQFKQQIFGCIAKDYKENVVLPLVVTGLPVTYFG
SQHEQLQRALKKETSVQIDGKFIHITVENALILQQPVALHAYFLKEGIIQERDRILIIDGGF
RTLEMTNMKQNVILNHYETELGCNKPLKNIKNIVQNHAGESNQLHINDMPNILEKGYGG
REENPQASQIDTLIQKELDTHFQDVMCVLQEQFMLDQYDTIIWTGGIVDLHKKRIKKMQ
GEISSFRMVDASKEAALHGYYMIGSQVFDDITNQSVYESKL
Alp9 BcerG_10126gi|168140763|[Bacillus cereus G9842]
(SEQ ID NO: 48)
MKSLYAIDVGIGFTKRAYRQDVDSEMTIKSEASTLAPVPNHTDSEDLTKVSFIDLDFAYY
MGNEAHQSDASLLPPFNEEIENYYESERFKQQIFGCIAKDYKENVVLPLVVTGLPVTCFG
SQHEQLQHALKKETSVQIDGKFINITVENALILQQPVALHAYFLKEGIIQEQDRILIIDGGF
RTLEMADMKQNLILNHYETELGCSKPLKNIKNILQNHAGESNQLHINDMPKILEKGYGD
RDENYETSQVDILIQKELDAHFQDVMRVLQEQFKLDQYDTIIWTGGIVDIHKKRIEKMQ
GEIASFRMVDASKEAALHGYYIIGSQVFEDITNQSAYESKL
Alp9 RBTH_08102gi|75764516|[Bacillus thuringiensis serovar
israelensis ATCC 35646]
(SEQ ID NO: 49)
MKSLYAIDVGIGFTKRAYRQDVDSEMTIKSEASTLAPVPNHTDSEDLTKVSFIDLDFAYY
MGNEAHQSDASLLPPFNEEIENYYESERFKQQIFGCIAKDYKENVVLPLVVTGLPVTCFG
SQHEQLQHALKKETSVQIDGKFINITVENALILQQPVALHAYFLKEGIIQEQDRILIIDGGF
RTLEMADMKQNLILNHYETELGCSKPLKNIKNILQNHAGESNQLHINDMPKILEKGYGD
RDENYETSQVDILIQKELDAHFQDVMRVLQEQFKLDQYDTIIWTGGIVDIHKKRIEKMQ
GEIASFRMVDASKEAALHGYYIIGSQVFEDITNQSAQKSQL
Alp9 Bant_01003833gi|65320431|[Bacillus anthracis str. A2012]
(SEQ ID NO: 50)
MKSLYAIDVGIGFTKRVYRQDEDSEVTVKSEASTLAPVPNHDESEDLTKVSFIDLDFAYY
MGNEAHQSDASFLPPFEEEIENYYESEQFKQQIFGCIAKDYKENVVLPLVVTGLPVTYFG
SQHEQLQRALKKETSVQIDGKFIHITVENALILQQPVALHAYFLKEGIIQERDRILIIDGGF
RTLEMTDMKQNVILNHYETELGCSKPLKNIKNIVQNHAGESDHLHINDMPNILEKGYGG
REEDPQTNQVHILIQKERMHTSKTLCVYYKNNLS
Alp9 Bcer0_30068gi|168170327|[Bacillus cereus 03BB108]
(SEQ ID NO: 51)
MLLGNPYAIDLGNGFTKRASKKNKSLEADVITELSVLAPVDDYYNEASFTKIELTNTDFP
YYIGEEARKSKLPLIRALGENKAKRYEDPTFKKQLFGFIAKDFKKNVTIPLLVTGLPVSHF
GNQRESIQKVAMEETAVKVNGELITIKVKQCLVIPQPVGTQYYLVKKEIINKEDRILIIDG
GFGTFDVTDMSGNAVIDRLGTELGCEKAFMSIEQIVRDNIGETPDLSVSNMHYILENGYK
YNGSLYDLYTHKDVAEQVDAELQRHFDAALREVSQKFNLAVYDKIVWTGGMAALHK
KRIEKKKEQFPTFAVLENGQEANLLGYYYLGCDVFDKLTKEKASN
Alp10 Bcer98_3741gi|152977413|ref|YP_001376930.1|hypothetical
protein Bcer98_3741 [Bacillus cereus subsp. cytotoxis NVH 391-98]
(SEQ ID NO: 52)
MSGGKMKLKTYKVEGTEYVWGDDIIKVNNTLNTYAQQNRYKTNQYKTLSKIALAEMA
AKTNVKSYDEILVITGVPSEEIGTKAVDEIKEVYQGAHDLEVNGKKVSINVVDVIVLAQP
VGTVMSRYLDEDGFVADDTYEDMTVGIIDIGTGTTDLDVISMLRREKESTSVPKGMHDV
YEPIVAKIKKETSATINDYKLEKVFEEGAYQASKRMDPIDFNDEKTASIKEVYDFIVNGV
NNAWKTFDRFDEVLVSDGGANTFHELLEEWIGKVTKLEESQTANVEGFYRYGKFEVGE
EDGE
Alp10 pSK41_p11 gi|32470396|[Staphylococcus aureus]
(SEQ ID NO: 53)
MSNVYVMALDFGNGFVKGKINDEKFVIPSRIGRKTNENNQLKGFVDNKLDVSEFIINGN
NDEVLLFGNDLDKTTNTGKDTASTNDRYDIKSFKDLVECSIGLLAREVPEEVVNVVIAT
GMPSNEIGTDKQAKFEKLLNKSRLIEIDGIAKTINVKGVKIVAQPMGTLLDLNMENGKVF
KAFTEGKYSVLDFGSGTTIIDTYQNMKRVEEESFVINKGTIDFYKRIASHVSKKSEGASIT
PRMIEKGLEYKQCKLNQKTVIDFKDEFYKEQDSLIEEVMSNFEITVGNINSIDRIIVTGGG
ANIHFDSLSHYYSDVFEKADDSQFSNVRGYEKLGELLKNKVEQESK
Alp11 gi|169192559|[Natranaerobius thermophilus JW/NM-WN-LF]
(SEQ ID NO: 54)
MVWGSIPDKDRKRRRFSDGISEEDEVISEEEEHHLGGDDAFDRSVKNVGIDLGYGYVKF
IDGKEPKMFPSVVGYGNSQKYKSALQLDLNPLDDLQIKIGDEHFFIGDLAIRQSEVASRS
LGKDRSQDKNARVLMLTALSLLSSWDKQGFNLVTGLPTNFYAAFAEEWESTLNGEFKT
KMKIGGKTQERSFQIEEVTTLPQPFGTLYDQVLNSVGKVVDRDLTDSKIGIVDIGFKTTD
LAVSDGMEFINPLSFSTTTGLSNVNRLVNEKLRHEFKIDREEHQLDDCINSQKIMVAGKS
EDISSWVREALQTVSDKISVEIESKWDYRDFDTLLLTGGGGEMLYPYLKDKFPNLVLVE
DPQTANVRGYQKLANNLFNA
Alp11 gi|51894421|STH3287 Symbiobacterium thermophilum IAM 14863]
(SEQ ID NO: 55)
MERLIGVDLGYGFVKATDGREGYLFPSVVGDGSPYLPLRLASQETDPTDNLRVQIGDRV
YHVGTLAVRQSRMAYGFLSVMRDEGNDLLVLFLTALSLFASEANTTFSVVTGLPPGRM
HLADQFVRSVRGDHRVVRYRTGNPEELYLRVDRVTVVPQPLGTYWSQVLDARGQLAQ
QHPAADARVGIVDIGFRTTDLVTVEGGEYVPEQSRTVPTGLSAAYGAVANALLREYGIE
RENHALDEAIISGEIGVSGRRVDITGLREKAFEQLATKVLVEIRSTWQVADYDFLWFTGG
GGLALQRYLVPQFSQASLIADPLTANSREYLAWAHYIYGTGGAPWLERTPVNPQPRQG
Alp11 gi|121998776|Hhal_1997 [Halorhodospira halophila SL1]
(SEQ ID NO: 56)
MERCIGLDMGYGFIKIDDGREGHVFPSVVGEGESGMPMSLGVAQRSGSSELRITYGGKS
YLLGDYAIRHSRLAHRGLSPTRAEGDDLKILFLGALSLYARETVNNFHVVTGLPPGRMH
MADDLVRQLRGDHEVIRHVGASRFGVSIRLEQIEVVPQPVGSFWAEVLDDRGQIRGDHP
LLNGRVGIMDIGFRTSDFATVIDGEYSPGFCKTVPLGISFGYEEIAQELSTQYGLEREQYT
LDEAIIQGQVNVNGRPVDIVELRDRIFGDIATKLLVEARSMWQIQEYDHIIITGGGGRVLE
RYLRPELSQAQLAQDSVTANARGYFNWAYFNAQQRAAEMGHATEQSSAEDYSSGSYG
TGSTTYSRGGDDGRDSAAVPQSRSGSEG
Alp11 gi|163722043|DalkDRAFT_4665 [Desulfatibacillum alkenivorans
AK-01]
(SEQ ID NO: 57)
MDVLGIDIGFGFTKATNGKEFLMFKSLLGEAAEIPFRANLANSSFTENLHVTVDEQTFFV
GDFAERQSGVRQSTLDQDLLVQEFAKVLALTAAGIFSEKYAPMNVVSGLPVGYFTEYK
EAFVKAILGHHTVNYHKADGSVVTRRININRVRMIPQPMGSVLNLLMDERGRITDRDLA
NKKVGVVDVGFKTTDFIIFDKLQFITRGSRTIDTGISDIFRTIANKLRKQVDVSLELYRLY
DPVSKGSIRIRGQELELAEIRDHVYAQAAGEIADEINQIWADDWDMDTVVLTGGGGME
LAKHLQPLIAGNVVGIPNDVDARLNNVQGYLKFARHLWEKDEPPPAREESAE
Alp12 gi|167036475|[Thermoanaerobacter pseudethanolicus ATCC 33223]
(SEQ ID NO: 58)
MFKIGLDLGYGYTKGINETGRMVLFPSLVGNAYQRNLIGLFGQNLNNLIENMHVVLRN
GKEEQEEYFIGDLARREGRNVSYAFDENKINHPNTKAVLASASALLFPSNDEPVHIVSGL
PLEQYIHQKDELRDMLKNFKAIVEFKGYNILKIVKFDRVTVFPQAAGAVYYAIMDDLQK
YLIKGSYIGLIDIGYRTTDYIVFVVDGKLSLREDLSGTLDIGMSQLNNAADKLFTQKTGS
KLDIPELIQLVNEGSIFYRGKVLNFEKELNEVKLEISRVIQDRIKAVWGSKLDFFNTIFLAG
GGAVSLFDSLKNLYENTVLVKNSQFANAKGFLKVAELEEKKERDRE
Alp12 gi|169835030|[Clostridium botulinum A3 str. Loch Maree]
(SEQ ID NO: 59)
MNKYTIAIDLGYGQIKGINQDNKRVIFPSIISSGKDRSLDTFFNSIDNIVDNIHVKILDEYFN
EKEYFVGELAKRQPSNSSFINRDNKINSEENKVLLATALGLLIPNDLPNDTKIHIVTGLPL
EHFIKQKQALNDMLKDFEHTIKFVDHNFSRNIKFEESNITLFPQGAGAIFSKINNDISSLLI
KETFIGLIDVGFKTTDIVVFRINKDKEPVFEQEMSATLDGLGMINIYNTMDKAFTDNSRD
GSKLNTEQLMLLCEEGKIFFKGDYIDLKKDLIKARKTLSTNIINKADGLWGSRKNSFNSI
MIAGGGGKVLYNHLKLIEPNMCQLIDNPEFANAIGYLEFGKQFK
Alp12 gi|167036509|ref|Teth39_0078 [Thermoanaerobacter
pseudethanolicus ATCC33223]
(SEQ ID NO: 60)
MFKVGLDLGYGYVKGINEKGKEVLFPSLVGNAYERVLSGLFGTDNNKADNMHVVIVN
ENKEEYFVGELARREGKNVSYAFDEDKIYHPNTRALLTASCLLLLPEEEVPVHIVTGLPL
EQYIHKKEEFKNMLKNFKVMAYFKGDEKVKTIKFEKVTIFPQAAGAVYHAVMADIQKY
LVKGSYIGLIDIGFKTTDYIVFMVEDKLILREDMSGTVEVGMSALNNTVDKIFTQRTGSKI
DVSELIRLISDGKIFYKGRELDFTKEIDAVRSEIARVMKDKIKLIWGSKLDFFNTVFLAGG
GAKELVEYMKDFYEKIVLVKNAQFANARGFLKVAELEEKKAVNVR
Alp12 gi|20808451|TTE2052 [Thermoanaerobacter tengcongensis MB4]
(SEQ ID NO: 61)
MNIGLDLGFGYVKGVNSQNKRIIFPSIVSIGFDRPLAGIFNTNDIIENLHVKIVDKDGENSY
YVGNLARREGFSNSFALDIDKYTEPEAKALLSTAIFLLTMNENEPINLVTGLPLKQFQAY
KKAFEEELKNYKALVSLPEYRLMKTVEFEKVTVFPQAAGAVYYALLEDLDKYLLSDSYI
VLIDIGFKTTDYIVFFVEDRPYFLADLSGTIDAGISKIFTAMEQIYTAKTGSNLDTGDFITIL
NKGSIYFKGKYIDFTEEITALKKELAKLIEKRIYTSLKGILDKVMVIFVAGGGGADLYPYL
KDVHTSVELVKDAQFANALGFLKVAEIQK
Alp13 [Paenibacillus sp. JDR-2]
(SEQ ID NO: 62)
MSILTIDGGGSTIKVYDGDQVRQFPSTISYDWRPRNIESKGQFDFEWEYNGEKGFAGTLA
QRESDCADSLKGDTKAHPEAALRVLLALHQYCPDPAPKIIVGQPIKTHTPDEKNAIKGM
LLNRRHDITVNGQRRIILIQRCEVAAEGVSAGLLIPVGGTIRVIDIGSGTVNFGTLIDRQFN
DLGSFTLSTGVETTRGGVAALAHQIARAARAAKWQPEEKVNLCGGGALVMLELLRPYF
PNVGVIPDPVTANVRAFHMIARKVYG
Alp13 [Natranaerobius thermophilus]
(SEQ ID NO: 63)
MIVAVDAGNYETKVVNSHGKYSFYSDIGEYRERKLNQKHGSDDMEWEYQGERGFAGS
LAKFESEYGGSMMGDSKYHRDGLLRVLLALHQYCDDNNFKIVVGQPISSHTQAEKQRI
KEMLEGDHILTVNGVKKTIRILNCQVAAEGASAFWIHPQGGCVRMLDIGSGTINAATILD
RRYVDKDSFTINFGANSNLTNDVKEMANAIIRKSHKWNKDDRVWLIGGIAEEIEPYLTG
HFKNLKVLKPNGLHSKWANVLGYYALASGLYE
Alp14 gi|113477981|Tery_4593 [Trichodesmium erythraeum IMS101]
(SEQ ID NO: 64)
MVIKQPAAAAMLTQKPSNINKKAILSADLGRTATKACVSRTQNGVVFIPSNVKQLSVDQ
VRAGNFESKPTDPLLDMWLEYQGYGYAVGQLAADFGANLFGDERSFAKSKIEDALVK
VLACAGYFQLKGEFSVVIGLPFYNQEQFEKEKAQIISQLESPHQMFYRGGEEVEIRINKV
WVMPEGYGSLLWTEANHGKEFQPQLPKLSLAIVDIGHQTTDFLMVDRFRFARAASKSE
PFAMSQFYEDVASKIEGADSQSLYLLEAVHKPEGQRSYRPKGATKPINLDGIIPELRKVF
AAKLCDRLIKWIPERVSDVILTGGGADFFREDLEKLLQEAGLKSHLAQPPREANALGQYI
YGEAQLAISK
Alp14 gi|23127403|Npun02004266 [Nostoc punctiforme PCC 73102]
(SEQ ID NO: 65)
MTDQPSAANPMNSAAIPMNRQPLASTTPINAVNNNPPTTTKSGGGSGKTILSVDLGRTST
KTCVSREPGSVVFVPANVKQMSIEQVRGGVFEARATDPLMDLWLEYQGNGYAVGQLA
ADFGANLGVGQSKVEAALVKVLASAGYFKLRDDISVVLGLPFLSLEQFEKEKAQLISQV
GGPHVLNFRGESISLNVSKVWVMPEGYGSLLWSEAQPKKSPSSPDFTKISVAIVDIGHQT
VDLLMVDNFRFARGASKSEDFGMNKFYELVSAEIEGADSQSLALISAVNKPRGERYYRP
KGASKPTNLDDFLPNLTEMFSREICSRVLAWLPERVTDVILTGGGGEFFWDDVQRLLKE
AKINAHLAAPSRQANALGQYIYGEAQLSSNRAARA
Alp14 gi|119493931|ref|ZP_01624493.1|hypothetical protein
L8106_27631 [Lyngbya sp. PCC 8106]
(SEQ ID NO: 66)
MQSNKQPVGQPAVGPNTIMNRQTTTTTTSSRRTILSVDLGRTSTKACVSRNPNEVVFIPS
NVAQLTVEKARGGGFESENTDPLLDLWLEYRGDGFAIGQLAADFGANLFGGNDTDSPS
KVNDALIKIFACAGYFKMKGDVEVILGLPFYSQEQFEREKEQIISLLMGPHVLLFRADQIT
IDIKSVRVMPEGYGSLIWCEAQKSKETPNFADLSVAIVDVGHQTTDFLTVDRFRFARGVS
QSEVFAMSKFYEEVATKIEGADSQSLYLLEAVHRPAGQRFYRPRGSAKPVNLDEIVPEL
RKKFAQELSSRLVEWLPERVTDVVLTGGGGEFFWEDLQPLLKQAQLRAHLAQPARKAN
ALGQFVYGEAQQVKR
Alp14 gi|17232583|all5091 [Nostoc sp. PCC 7120]
(SEQ ID NO: 67)
MFVPANVKQMSIEQVRGGVFEARATDPLMDLWLEYQGKGYAVGQLAADFGANLGVG
QSKVEDALIKVLASAGYFKLKDEISVVLGLPFLSLEQFEREKAQLTSQVTGPHVLNFRGE
SVSLNITKVWVMPEGYGSLLWSEAQPKKGGASPDFTKISTAIVDIGHQTIDLLMVDNFRF
ARGASKSEDFGMNKFYELVAAEIDGADSQSLALISAVNKPKGERFYRPKGASKPTNLDD
SLPNLIEQFSREICSRVLAWLPERVTDVIITGGGGEFFWEDVQRLLKDAQISAHLAAPSRQ
ANALGQYIYGEAQLSSNRAARA
Alp14 gi|75908582|ref|YP_322878.1|hypothetical protein Ava_2365
[Anabaena variabilis ATCC 29413]
(SEQ ID NO: 68)
MTDQPSAATPMNAAAIPLNRVSASTPINAAPANNKPNNGSSKSILSVDLGRTSTKTCVSR
EPNNVVFVPANVKQMSIEQVRGGVFEARATDPLMDLWLEYQGKGYAVGQLAADFGA
NLGVGQSKVEDALIKVLASAGYFKLKDEISVVLGLPFLSLEQFEREKAQLTSQVTGPHVL
NFRGESVSLNITKVWVMPEGYGSLLWSEAQPKKGGASPDFTKISTAIVDIGHQTIDLLMV
DNFRFARGASKSEDFGMNKFYELVAAEIDGADSQSLALISAVNKPKGERFYRPKGASKP
TNLDDSLPNLIEQFSREICSRVLAWLPERVTDVIITGGGGEFFWEDVQRLLKDAQISAHLA
APSRQANALGQYIYGEAQLSSNRAARA
Alp14 gi|119511106|ref|ZP_01630224.1|hypothetical protein
N9414_16841 [Nodularia spumigena CCY9414]
(SEQ ID NO: 69)
MTDQPSAATPMNAAAIPLNRAANIPINANPATNRPNLGGKTILSVDLGRTSTKTCISREP
ANVVFVPANVKKMSIEQVKGGVFEARATDPLMDLWLEYQGYGYAVGQLAADFGANL
GVGQSKVEDALIKVLSCACYFKLKDEISVIMGLPFLSLEQFEKEKAQLTSQVTGPHVFNF
RGESVSLNITKIWVMPEGYGSLLWSEAQPKTGGKVPDFTKISVAVVDIGHQTIDLLMVD
NFRFARGASQSEDFGMNKFYDMVAAEIDGADSQSLALITAVNKPKGERLYRPKGASKP
TNLDDFLPNLIEMFSRDICSRVLAWLPERVTDVIITGGGGEFFWEDVQRLLKEAQINAHL
SAPSRQANALGQYIYGEAQLSVGRATRA
Alp14 gi|75812595|ref|YP_320214.1|hypothetical protein Ava_130315
[Anabaena variabilis ATCC 29413]
(SEQ ID NO: 70)
MIPLVFGALGMAVGAVAGAFTAHAAGEKNRQEAKHHKQIANELTNKYASLAEQYYEL
ADKNKKDVKKLTDQLALSEVEKDFLRLAVRLQQNLIFLMWEIDREPTVNALNSFQSAV
EQTNQVLSQLQEELIIVPDDYYTRTLTAIEVTKEINLIIPSDTDSTNILSVDLGRAFTKACIS
REPSSVVFIPANVKHIPFEQIFTGAIYKYSSIPTDPLMNLWLEYKGSGYAVGQLGAKLGA
NLGVGQSKVEDALAKILAAIGYFKLKDEISVVISLPFLCSEQFEIEKTELISIIAGPHIMKFR
GESVYFNITKVWVMPEGYGSLLWKEAQPKKRGDVPDFTKNSVAIIDIGYESTNIIMLNNF
CFVKDASKSEYFGMNKLYELIASEIEGADSQSLALISAITKPKEERFYRPKGASKAINLDD
FLPNLIECFSREICSRILAWLDEQEDWTMNRVTNLIITGGGGEIFWEDVQRLLKEARINAH
LAAPSRQANALGQYIYGEARLRKFNS
Alp15 pBMB67_042copyBt]
(SEQ ID NO: 71)
Mveqmlsknmllggfdtgnikakisflnekgniesfaiptviaeappakidlksapskkndyvnekd
ediellhvriisnsldgdarsrawyvgayakdqedrqeptvdemgktedkfsqknkklhliplftsm
avaaarigkeevsvpfsggmpiedyklrgeeqilemlygehtvefldgtyegkkikitindgtmnve
gyssvlailfdivngeivevegmdaeigesyaindlgagtsdnaffedgelnkklstntdlgtnkyi
deilknikerfmeneilksfmtdeiespfktredfiqrlvmpevekmieddtykptfsvkwgpvken
vtdivmdgmlkyaedqkaslmkfwfktnadknivvgggvlfgyaglrdlkeqdgfilpkniqesayf
tsrsylianlleqlnkegvea
Alp16 pE88_13 [Clostridium tetani E88]
(SEQ ID NO: 72)
MENITNEYVMTLDAGKYETKLIGKNKKGTTEDIKRVIFKTKIYNLEDGYIDIEGNSHKIEL
DGKEYLIGEQGVEDSSETSKTNLIHKLAAYTAITQVLDSNKNNKVQLVLACPLSVLRNA
KAKEEYRDYIKGNGEITVKVDDKEYSFEITDITIKAEGSGVLFLEQENFKNKNVAVIDFG
GLNMGFSLYRNCVVNPSERFIEEHGVKDLIIRVGDALTDLNNGNLITNEQAESALNNGY
MKKGGEIDTESSTVIKKVKEKFLKDAIKLIEKRGFKLDQLDSLIFIGGTTQKLKEQISKTY
PNNSIITNNSQWTTCEGLYKVAVAKYCIQ
Alp16 gi|168724430|CdifQCD-7_08576 [Clostridium difficile QCD-
76w55]
(SEQ ID NO: 73)
MNEKIANKIIVVDPGKNAVKVVVFSNTYELLTHYMFPSKTQIKRTFSDIDGSSDFQFRAE
FEGSKYLIGEGVQSSYNFETTKNNIHHQLCVYTAIAKEVHSKNENVHVVVGYPSSDFSN
EIQREKYVDLIKSNEKIDIILNGSDKSFNISEFNVFPEGMALVPRMKFPKRKVRVIDIGGQ
NLNHRLYDEKGNTLESFSLDEAGINHLEEYLRTTLRKNINADMVDIDSINILEAIEKQKID
AISDDMINGYDSVASFIENTVLDFIDNKILNQLSSKNVFLYKRSHLIIFTGGGSITLKKYLE
ELLPNNIGNLYFSETATWDNCASYLIKDLTLKFKDSKISKIELANYTKKIVKAFNDLIIGIT
PSTEENLTEDEELINRKRKTVKQK
Alp17 gi|169193825|NtherDRAFT_1874 [Natranaerobius thermophilus
JW/NM-WN-LF]
(SEQ ID NO: 74)
MSNNILNCEIDLGYWFSNLRTRKILGEKNIRLRSKVEFTTDALISGAGTYHFRHDDLKGV
VGEGASQHSLELDKTRDKAYKVLAYSLIALAIEKNKDQMERDKEFPIINLVTNYPLNIYN
GQTKEQFEEFLKTSDFIHVFVNREHKLFWLKNCTVFPQTVPVSYANPSAFKNQIKGIVDI
GGMTTQGVILDSFNIIPSSRFTENLGCLNLYNKVRKALNSYFTVNIQDYEMPTIIKNGLRV
NTKKSLEIIDEIIRDHIKEIQNAMTVNNWNEENIPIMFTGGGSLLLREYLEEMFPHVEFSQ
DPLWDNAKGLRKVGEIFYGRQN
Alp18 gi|121593973|Ajs_1600 [Acidovorax sp. JS42]
(SEQ ID NO: 75)
MELIVRAVDVGSGNTKFVTGVTGTEIRCASFPSIAYPSSGETPQWPASERRKTVCIPVGPL
FYEVGPDVGLAADTFRAKQLHDEYTESPEYMALLRGALSMMKVPHIDLLIVGLPVALFI
LKKAALEKAVVGSHQVGGGKTVTVAKAMAVAQPQGALVHYAAEHQKIETIGTEQSLV
IDPGSRTFDWLVTRGMRLVQKQSHSINRGMSDVLRLLAAEISKDIGTPYRDFDAIDLALR
TGKAPVIFQKPYDMKKHLPLAESVAQQAVSTMRQWIETPESLQNIILVGGGAFLFKKAV
KAAFPKHRIHEVKEPMFANVRGFQIAGHNYAASAMASGRDRGAGEAV
Alp18 gi|91790780|Bpro_4960 [Polaromonas sp. JS666]
(SEQ ID NO: 76)
MKPETPMVDVRAVDVGYFSTKLTLARNLEGNASTIASMKPETPVVVDVRAVDIGYFST
KLTLGRKLVGNASTIATALFPSLAPRLPASMSMQTALHGKPDGSVVDVDDVNYFVGRD
AILYSSGREPREVLADYSMTDKYHALMRGAFHYIAQDAKATSELVIRHLVMGLPLNTFG
ENRDRLAARATGEHLLPDPSNPGSMRRITVEKASVIVQPQGALVSYGTTHREIFKEGWV
LVVDPGGGTLDWYVARGRLPNWQRSGAYPKSMLACAYAVADRIDPTWRDNFEIIERID
KAIRDKAPSFMTAGNTYELAPYTSAIEAVLKESTDKMVARLGSLDNLDLILFTGGGAKV
YFDFFKSRNPKLTNIMFMDDDPVFSNVKGFHVAGEIMSKSRTI
Alp18 gi|153886906|[Ralstonia pickettii 12D]
(SEQ ID NO: 77)
MSKSTPAIVRAIDVGYGNTKYTLSQRNIDMDAEVGLFPSLAPRATQSDFTGGLMAKADR
IVVQVDGESYSVGMDALAESKGIYKREVASAYSTSRAYRALFLGALQKMRLTAIDYMV
VGLPLTTYDRYAKELTELLTGTHEVPNPMALDQALKVTVRRVKVFPQPSGAFYNYAVP
RKLLQSMSQQTNLVLDPGYGTLDWFVTEGAKPLTGRCSATPKSVWAVISAVADHIGPD
LTSNPRTMSRIDNALRTGAPLTINGKTIDISPFKPIVDQIVADAINDMLMSIGNLSDIDNILI
TGGGAHLFVDHVKKELGKTHSQIHVDTDPVYSNVRGFQYAGEFWAGMDRQRAAA
Alp18 gi|89885972|Rfer_4487 [Rhodoferax ferrireducens T118]
(SEQ ID NO: 78)
MGLFPERLYQTARIEQVQHTTVFMSKTPPTFRALDLGFGFTKFSKGHYLQDGSLEVSAFP
SYAAAAVNFSIGAGVMTDLSIVKVSVDDEHFLVGEDVRNAADGVGRQMLESTFFTSSQ
YIALARGAMGFMNVPNHGEVDSLVMGLPLNIFRDQSIVDHVEAAMKGTHLVPDITKNS
GVERTILVKNVSIIPQVVGSLVAMSRDAGLMQKVNEQHNLTIDVGYGTLLWLVSDGFTP
VPARSNGNMGGVSSLLQKIIRSIDPSAVSSINIMDRLDKALLEDKASILINGAEVEVAKYH
RQLASAARENLTEMIRSIGTKADIDNVFLTGGGAHLYKDAIAAVFPGRQVHIASKGSRFT
NVRGFQFLAETED
Alp18 gi|56550594|RMe0036 [Ralstonia metallidurans CH34]
(SEQ ID NO: 79)
MKQQNELIKHPTIAIDVGYGNTKTAWAMGAEIATNMFPSLAPLAANSSLNAFGGGVFK
GRNVLNVEVDGARYEVGPGVSISGAHVHTGRSLSEDFATTAGYAALLAGALHYAGARE
VDRLVLGLPVHNTQKYAAHLKERFAGTHNFGWGDIHVGSVLPLPQPLGTLIHYIQQRGK
QYDPDNSYLVIDVGYFTTDWVVARGYTVDDTRSGGVPGGAARIYQQVASLITADRNQP
DVGIERIDQAIRDAKPLVYFGEDLDMGPYLSEAMALTNQPVKEIQTRVGRTDDLRAIILT
GGGAQLYAPAIRAAFPLNPIHMMDSPCFANVRGFYTIGAATRQASRAA
Alp18 g|171907839|Daro_2217 [Dechloromonas aromatica RCB]
(SEQ ID NO: 80)
MELIVRAVDVGSGNTKFVTAAAGTDIRCASFPSVAYPSSDDSPSWPASERKKTVCIPIGP
LFYEVGPDVSLAADTFRAKQLHDEYTETPEYMALLRGALSMMKVSHIDLLVVGLPVAL
FTVKKSALEKAMTGRHDIGNNKVVTVGKAMAVPQPQGALVHYASEHQKMVEIGNEQS
LIIDPGSRTFDWLVARGMRFVQKQSYSFNRGMSDVLRLLAAEITKDIGSPYRDYDAIDLA
LRTGKQPLIFQKPYDMKRLLPLAETVAEQAVSTMKEWIEAPHSLQNIILVGGGAFLFRKA
VKAAFPKHRIHEVKEPMFANVRGFQLAGQNYARSKMTATDRGQVQGASGELE
Alp18 gi|118699156|[Burkholderia ambifaria MC40-6]
(SEQ ID NO: 81)
MKTAVFAVDVGYGNTKYAHRAASGTIATGMFPSLTPLAASRTLSGYGESVLTARKVSTI
VIDQVEYEVGPDVPLTAAYGNTGRALADDYVLSDNYAALLFGAIHFSGVTHIERLVLGL
PVHNMKKYSAELKERFAGELDFGAGRVTVDKVVVIPQPLGSLVLASSNRQHEFGRDVA
HLVVDVGYFTTDWVYANGFTMDDNRSGGMPGGASQIYQRIASLVARDQGDEVEDIERI
DKALREQTPFFFYGTNIDLAPYLEQAQPLISGVVKEMQNNVGRLPNVRSIILSGGGAALY
AAVIRRAFPRVLIEVIDAPCLANVRGFLMVGEAGLARERR
ALP18 pRALTAgi|170938864|[Cupriavidus taiwanensis]
(SEQ ID NO: 82)
MNTTKTIAVDVGYGNTKFAFPLGADVATRMFLSLAPTRSASSLANHGDGYFQSRDVVH
VTVDGAEYEVGPDVSITSAYGNTGRTLSEDFVTTPEYAALLFGALHYSQARDVGQLILG
LPVHTLQKYAGVLQERFAGTHDFGAGSVSINRVVALPQPLGSLVTFMRQSGKDLDPDD
NCLIVDVGYFTTDWVVARGYMMDDTRSGGVPGGSSRIYQQVAQLLSADEGGEPSGSIE
RIDKSLRDGKLMRYYNKMVDLRPYFEVAKAQCQTAVKEMQTRVGRTEDIAAIVLTGG
GSALYSGAIRAAFPRSHIVAMESPCYANVRGFFDIGSARQARG
ALP18 gi|38637991|ref|NP_942965.1|hypothetical protein PHG330
[Ralstonia eutropha H16]
(SEQ ID NO: 83)
MSTNTIAVDVGYGNTKFAFPLGADVAASMFPSLAPTRSASSLASHGGGYFQARDVVHV
TVDGAEYEVGPDVSITSAYGNNGRTLSEDFVTTPEYAALLFGALHYSQARDVGQLILGL
PVHTLQKYAGALQERFTGAHDFGAGDVTIKRVVALPQPLGSLVTFMRQSGKELDPDDN
CLIVDVGYFTTDWVVARGYMMDDTRSGGVPGGSSRIYKQVATLLSADEGGEPTGDIERI
DKALRQGKLMRYYEKMVDLRPYFEVAKAQCQMAVKEMQTRVGRTEDIAAIVLTGGGS
ALYSGAIRAAFPRSHIVAMDSPCFANVRGFFDIGSARQARG
ALP18 gi|121530832|ref|ZP_01663440.1|conserved hypothetical protein
[Ralstonia pickettii 12J]
(SEQ ID NO: 84)
MKAATVAVDVGYGNTKFAFPMGSETKLNMFPSLAPQAAPRALANHGNGFFKARDVITI
AIDGVEYEVGPGVSLSSAYGQTGRTLSEDFVTKDEYAALLGGALRLAQVSEVGQLILGL
PVHTTQKYASYLRDRFTGTLDFGGEPVEIGSVICLPQPLGALVTFMRQQNTKFDADNAH
LVIDVGYFTTDWVVAQGFTMDDNRSGGVPGGSSKIYQQIASLIEQDEGEPVTGIERIDKC
LRDKKPMLFFDKEIDLTPYLEKARSVCQLAVKEIQTRVGRTEDIRAIILAGGGSALYVPAI
RAAFPRTPIHALSSPCFANVSGFYDIGSTRPVKQK
ALP18 gi|153887928|ref|ZP_02009075.1|conserved hypothetical protein
[Ralstonia pickettii 12D]
(SEQ ID NO: 85)
MKAATVAVDVGYGNTKFAFSMGSETKLNMFPSLAPQAAPRALANHGNGFFKARDVITI
AIDGVEYEVGPGVSLSSAYGQTGRTLSEDFVTKDEYAALLGGALRLAQVSEVGQLILGL
PVHTTQKYASYLRDRFTGTLDFGGEPVEIGSVICLPQPLGALVTFMRQQNTKFDADNAH
LVIDVGYFTTDWVVAQGFTMDDNRSGGVPGGSSKIYQQIASLIEQDEGEPVTGIERIDKC
LRDKKPMLFFDKEIDLTPYLEKARSVCQLAVKEIQTRVGRTEDIRAIILAGGGSALYVPAI
RAAFPRTPIHALSSPCFANVSGFYDIGSTRPVKQK
ALP18 gi|171320986|ref|ZP_02909976.1|conserved hypothetical protein
[Burkholderia ambifaria MEX-5]
(SEQ ID NO: 86)
MKTAVFAIDVGYGNTKYAHRAANNAVASGMFPSLAPLAASRSIAGYGDSVLTARKVA
TIVIDQVEYEVGPDVSLTAAYGNTGRALADDYIRTNNYAALLLGAIHFSGVTHIERLVLG
LPVHNLKKYAGALMERFTGTLDFGAGRVKIDKVMVIPQPLGSLVLASSNRKGGFGRDV
EHLVVDVGYFTTDWVYASGFAMDDKRSGGMPGGASQIYQRIAQLIARDQGDAVEDIER
IDKALREQTPFFFYGNDIDLAPYLEKAQPLISGVVKEMQNNVGRLANVRSIILSGGGAAL
YASVIRQAFPRVVIEVIDAPCLANVRGFLLVGESSVARERR
ALP18 CHROM3gi|161522610|Bmul_5577 [Burkholderia multivorans ATCC
17616]
(SEQ ID NO: 87)
MKTAVFAIDVGYGNTKYAYRAATNAVVSGMFPSLAPLAASRSIAGYGESVLTARKVAT
IVIDQVEYEVGPDVSLTAAYGNTGRALADDYVLSANYAGLLFGAIHFAGVDHIERLVLG
LPVHNMKKYSAELKERFTGELNFGAGRVTIDKVMVIPQPLGSLVLASSNRQGGFGRDVE
HLVVDVGYFTTDWVYANGFTMDDKRSGGMPGGASQIYQRIAALIARDQGDEVEDIERI
DKALREQTPFFFYGSNIDLAPYLEMAQPLISGVVKEMQNNVGRLANVRSIILSGGGAAL
YAGVIRRAFPRVVIEVIDAPCLANVRGFLLVGESSLARERR
ALP18 pBVIE02gi|134287584|Bcep1808_7086 [Burkholderia vietnamiensis G4]
(SEQ ID NO: 88)
MFPSLAPLAASRSIAGYGESVLTARKVATIVIDQVEYEVGPDVSLTAAYGNTGRALADD
YVLSANYAALLFGAIHFAGVDHIERLVLGLPVHNMKKYAAELKERFTGELDFGAGRVKI
DKVMVIPQPLGSLVLASSNRPGGFGRDVEHLVVDVGYFTTDWVYANGFTMDDKRSGG
MPGGASQIYQRIAALIARDQGDEVEDIERIDKALREKTPFFFYGTNVDLAPYLEMAQPLI
SGVVKEMQNNVGRLANVRSIILSGGGAALYAAVIRRAFPRVVIEVIDAPCLANVRGFLL
VGESSLARERR
ALP18 gi|71908146|ref|YP_285733.1|hypothetical protein Daro_2530
[Dechloromonas aromatica RCB]
(SEQ ID NO: 89)
MLAARKSIEEPHMDYIVRAVDVGFGNTKYVSNVVGSDIRCTNFPSVAYPSMREPSGQPG
YERRKTVAIPVNGLFYEVGPEVELAADTFRATQMHDRYTETPEYTALLRGALALMKQP
EIDLLVVGLPVAALTTKKTALEKAVTGTHDIGNGKNVVVRKALAIAQPQGALVDFVEQ
HGKTTTIEREQSLILDPGSRTFDWLVARGMRLVQNKSHSVNRGVFDILQAIAAEIGHDIG
TPYNDIEAIDLALRTGKNPVIYQKPYDISRAMPMAHSIAQQAVASMMRWIDASYSFQNII
LVGGGAYLFKKAVKEAFPKHRILEVKDPLHANVRGFQIAGMNHVDKLFSGTATATHGGA
Alp19 gi|163937904|BcerKBAB4_5321 [Bacillus weihenstephanensis KBAB4]
(SEQ ID NO: 90)
MTVDYIGVESANSFVKVASANEELCYLNTLRRVESFEDTTGLTVYTYEGIRYVIGEAQGI
SSSARNDDRYSSAGYRTETILAISQLVKDGSEIVVGTGLPSEDYKNGDNHEKVKRNLVG
EHTVQIDGKTKTFSILRVYTPMQPIGSVVNRIYDYNLKVRKDMESERTARKLVIDIGFGT
TDVCEAEGLRIVRYDGVQVGMLEANRIIKDELSKRGARGIVSLLHMDTLLRNAKREYV
KDEFTDKEILSKVIIEIGGKEYEIKDLMEQALEYTARIVMQRVDNLGYVLKDYDVVLFTG
GSLLALHKYIKPYLTGVNTKAEQGAQTANVKGYTKYAMIQDAKAVAK
Alp20 gi|91791236|Bpro_5434 [Polaromonas sp. J5666]
(SEQ ID NO: 91)
MPEIVAIDLGYGHTKVVSQGRDGEIKRMIFPSVAPITTRERTAESNGMGALRTVTVCVG
ANNYVIGKDAYLEADSNYSRSRLDEYSQTDGYHALMLGALALSGLREIDQLVIGLPLTT
LDTYHSVMSSKYLGEHSIGATYARRKVELAVRNVLVTSQPAGAMINAVAGQPGLKKAT
NLAIDMGYFTMDFLMCEGLRPFYKRSGAVQGGMSGYYDHLNGMVAEKITSEGLPAQS
TVDHFRLEETLSNGIQGENGRTIYSLRIGKLEVDITECVERASTRLTEYLDRMMTTLGGG
SSMGIISSVVLAGGGARMILPAVKERFGKTHDIVMQDAAQYAIANGFLHFGLASAKRAA
AQV
Alp20 gi|117676207|ref|YP_863783.1|hypothetical protein Shewana3_4268
[Shewanella sp. ANA-3]
(SEQ ID NO: 92)
MNNPVIITVDVGYGTTTCVHKESLGNYSVKTFPSLPIPIKSDINLGLAGEERDVTNVEVD
GITYEVGSDVGTSVGSRNVRVLNTESFITSDRYKALLFGALSFLGKSNHIDIDVLVLGLPV
SVMFRKDELAKIYTGTHQITPSRKVTIRQVLVFEQPLGALMSFLRQGGNERFAQCKDKT
MLSIDPGYMTTDFITSKGLKVSPNRSGDSETGMSKVIGAVEVALRSQLEGFNIKQINPELI
DQAFISGELKLYGKAMKFPKCDLFDVTSAIRSVTDEALTSVVNKVGDGQDIDLIIVSGGA
AAVYLPSIQRAFPFHKIEVVDDSLTAVARGLQTAGEQFIRGAIARGDYQKLKAV
Alp21 gi|86475955|[Clostridium perfringens]
(SEQ ID NO: 93)
MLKLGIDLGNGYTKFKGSKFASKTKVGRLASLAGLGEKPKDIHEVGYKGTTYIVGDGE
VFTSPDRYFGLDYEICLLTAIGLSSKDIVIDANICVGLPIIYFMSETKVLLEKKLNELTEKD
SIKITINGQDKIIKINNARVFAEGAYVLDCMDTDNIITIDLGAGTVNITQWDNLIPISYDTIT
KSFNKLYRDIANHIKNTGRGVVTPAYIEANFGEDTITIDGKVVDITDTKQMISKYVSAIVS
NVYDICDVPQANKIQIFGGGAIATEEYWKDAFGKDRDGVSVLPNSQYTNSKIYQKAAEI
LK
Alp21 gi|168206394|[Clostridium perfringens E str. JGS1987]
(SEQ ID NO: 94)
MLKLGIDLGNGYTKFKGSKFASKTKVGRLASLAGLGEKPKDIHEVGYKGTTYIVGDGE
VFTSPDRYFGLDYEICLLTAIGLSSKEIVIDANICVGLPIIYFMSETKVLLEKKLNELTEKDS
IKITINGQDKIIKINNARVFAEGAYVLDCMDTDNIITIDLGAGTVNITQWDNLIPISYDTITK
SFNKLYRDIANHIKNTGRGVVTPAYIEANFGEDTITIDGKVVDITDTKQMISKYVSAIVSN
VYDICDVPQANKIQIFGGGAIATEEYWKNAFGKDRDGVSVLPNSQYTNSKIYQKAAEILK
Alp21 gi|168211010|[Clostridium perfringens B str. ATCC 3626]
(SEQ ID NO: 95)
MLKLGIDLGNGYTKFKGSKFASKTKVGRLASLAGLGEKPKDIHEVGYKGTTYIVGDGE
VFTSPDRYFGLDYEICLLTAIGLSSKDIVIDANICVGLPIIYFMSKTKVLLEKKLNELTEKD
SIKITINGQDKIIKINNARVFAEGAYVLDCMDTDNIITIDLGAGTVNITQWDNLIPISYDTIT
KSFNKLYRDIANHIKNTGRGVVTPAYIEAHFGEDTITIDGKVVDITDTKQMISKYVSAIVS
NVYDICDVPQANKIQIFGGGAIATEEYWKNAFGKDRDGVSVLPNSQYTNSKIYQKAAEI
LK
Alp21 gi|148245152|CKL_4044 [Clostridium kluyveri DSM 555]
(SEQ ID NO: 96)
MVILGLDNGYHFTKTSEGVMFSSTVRKGKDIDINADTIQTNIDGQDYVVGAPNGEYVAD
SNKIDSIVTEICTFTAIAKSFPENKLIDCNIVAGLPVSYYSKQKSDFKEKLLGYGNKKVKL
NKHNFQINIVGAEIYPQSAGVVFVNSKDVKSDDSLVVDIGGGTVDVSAFHGLRLTNMAT
YNLGMLVLYSKLAQKLNSEYECKFMDYELYDKLKKGYITSNKFGRIDLEILNDDIEEHT
NVILNNIKRDFNYNSMDNIFVIGGGGVELYDRIKQKFKNAILCDDAQFVNANAFELMGQ
MKFATK
Alp21 gi|169344353|ref|ZP_02865326.1|StbA protein [Clostridium
perfringens C str. JGS1495]
(SEQ ID NO: 97)
MKILGLDNGYNYTKTSKNICILSTVEKGHDDYNNVLEMNFNGENYIIGEPTGQYIVDAN
KFKTEEGKELLRVTTLAAIGLSYPEESVIDVSIVAGLPVAFYADQKEELTKLIKGLDDSCI
EINKLGKKQIIKIDKVMVLPQACGIIIEKNKKNESSLVIDIGGGTWDIAQFTGLKLVEKAT
YEKGMLVLYSAIAQELNAKYYTKFETSDIQNIIDRKYFTVDGVKKGIEDIEEYIDNYVRKI
AATIKRDFDTTNIDNFYLIGGGAISLESYVKKYFPSIEVEKECQFTNVNSFKFMGELKLK
Alp21 gi|169344353|[Clostridium perfringens C str. JGS1495]
(SEQ ID NO: 98)
MKILGLDNGYNYTKTSKNICILSTVEKGHDDYNNVLEMNFNGENYIIGEPTGQYIVDAN
KFKTEEGKELLRVTTLAAIGLSYPEESVIDVSIVAGLPVAFYADQKEELTKLIKGLDDSCI
EINKLGKKQIIKIDKVMVLPQACGIIIEKNKKNESSLVIDIGGGTWDIAQFTGLKLVEKAT
YEKGMLVLYSAIAQELNAKYYTKFETSDIQNIIDRKYFTVDGVKKGIEDIEEYIDNYVRKI
AATIKRDFDTTNIDNFYLIGGGAISLESYVKKYFPSIEVEKECQFTNVNSFKFMGELKLK
Alp22 gi|134287988|[Burkholderia vietnamiensis G4]
(SEQ ID NO: 99)
MTKNAAVSEEVGNVVHLQPEGEVRFAGTDDGHDGIKIVTDDWRQIHVPSRITRGADLIS
LNDADDNVYEGPDGTLYAVSPTLPYFDTTFSDYALSDINLVLVHHALAKAGLGGQRVN
LVTGLPVGDYYVANRPNVDFISRKVAHLRENTVRNKNESVALATIVKHNVVSEAIAAFF
DLLLDREGNQRDDVAEMVATGGIAIVDIGGKTTDTAVVMNGGRDVDGKRSGTDPIGGL
SLNKAVENELKAEFSVTALNPAQVDRAVREGVLRLYGKDHDCRAIIDKQKSELAKQIIA
ATHRKMRDASDLERVFFVGGGALLLCDQLEELYQHAEFVEDPQFANARGMLKAAMFL
QPR
Alp22 gi|153930634|ref|YP_001393404.1|plasmid stability protein StbA
family protein [Yersinia pseudotuberculosis IP 31758]
(SEQ ID NO: 100)
MFSIPSRASYDVSIINIEGNDKSFIFETHNNKKFTVDESVPSPLDTRNIAIPYPVSDLNRVLV
HAALINAGYAGKDVHINTGLPVSHYYKPSTEINQTLVEQKKANLMHPVRCGIDGSLPVA
NIIANEVCSEGVAAYVDQLLDADGNTTEQYEEMYNSVVGVVDIGGHTTDCAVLLPKMV
INMTRSGSSEVGVLNLYDGIKTAVAAKFGINSSSITKRQIESALNTGKIMISRQAIDVSDIV
NTEKTRLFDQIIMAINEVIGTDEDIEKLIFVGGGSIVFEDYLRDHYKSIIIPEHPEFANARGM
MKLVKYIPKSN
Alp22 gi|126640709|ref|YP_001083693.1|hypothetical protein A1S_0642
[Acinetobacter baumannii ATCC 17978]
(SEQ ID NO: 101)
MGKSFRLPSRVANGRTIIGDTDEVNKQIIHVNGKYFTVDEFTKEHIDTRTEDYPLSDANV
ALVHHALHQAFDGQYRKFKIATGLPLNRYYGGKDKAKNEKLIADKTQNLLINKDFNNP
TVYNLYEHDKKNDPLQILNHIVLSEGQCAYFDALMDDNGKRSSMYEDLWEGGCAIIDIG
GRTTDIAMINPRGGTMQASRCDTLDVGIITLKNKVSQNLKEFFGLSSNITDWRLSKALKT
GIYNHGGKDHDISKILNAAKVEITDQIENSIKVNVQDGQDLGAVLLVGGGSITLGDELLK
RFNYDNWHLVKQPEFANARGMYKCAKYISKL
Alp23 gi|168191642|ref|ZP_02625920.1|Predicted ATPase of HSP70 class
[Clostridium butyricum 5521]
(SEQ ID NO: 102)
MQNYSISGIDIGHATCSTSNNVLFESKITETEPLNKASKLIIDNKELWLGEGNYDTTYRKV
DKKNYINFLYGALALSTDTVYNYIVLGLPLSQYKEDKAALTNLVLNNNEKSVIINGIQKP
LVIKDVEIYPEGVVTLDDEWEGIVVDIGGRTTDCAMVINERNRRKIINPISLPLGTINFQTD
LIKKINNKYSLDLQVNDAERILKNGLILDGEIIKDDSIEDMYNLFVDKLINQLQVEYSLRT
NFISLTGGGANLFYNSIRKQIGENSVSLQENSIYANSQAFGELGESIWQ
Alp24gi|58701065|[Lactobacillus paracasei subsp.] paracasei]
(SEQ ID NO: 103)
MEIFSLDLGNKQTKLKSSKSEYVLPSRYLNQADMPMSVGSSTTNNDLHIYSVPFSDDKY
VWGRDIDGLHLDEYLADTIMYGNRYNSEAFKLLANFALGLLASDFKIANNQVLEVVVT
AGLPTGDYADQERLRSLLKVLEGQHQVTIDDQIVTVRVRKVYILPQPIGTLYNELLDDQ
GFIKNKALLDEKVGIVDVGGGTILIDTILNFELSGKNRQQFNTGVNDLYEAIASRIEGDVS
LYQLEKELRHGNQQHQWSYRFSKNRQDDITELVGKESDRFTRRLVANVTSTLKNLDSID
TLFFTGGGANLINQKILKTTFTNAAIVKDTEVANVNGFYKYGLSQQVQEKEGK
Alp24 i|125623971|[Lactococcus lactis subsp. cremoris MG1363]
(SEQ ID NO: 104)
MNIFAIDLGNKRIKMKSERGEYSYPSSYLNAEQVVTGGLGSEIIEQNYHFQTIQDSTNSFI
WGPNLEVYNLPERMIDTYARSGRMKQKKTIRIFEFALGRLVMDFPEAFESPLVVHLMLG
LSITDMHQESDTIDMLKKLAVGQHQIIIGGRVVTIIIPSEEFLSIIPQYMGTVLNLAFDQDY
QRNRRFSDGRIGVIDIGGGTILINRSVALNPSPIGDERFEGIQNLIKEIGRRINSTKSFLIEEM
LRSVDSEGNYVYPPNSNVQDSKNVSPIVEGEIERYTRFTVAPLVTENFPDIEEVDFIVVTG
GGASLLAKEALKDEIGEEYFSRLLFLNESEFANVRGFYKGGYLKWHSSNEELAVEARRE
KPAELQESQTRDVIVPPIRNTETSMDRELLEAQQKLQALQSEIDGVQIEFEN
Alp25 gi|109645228|ref|ZP_01369148.1|hypothetical protein Dhaf_2439
[Desulfitobacterium hafniense DCB-2]
(SEQ ID NO: 105)
MFENDILVAGGDPGFGAIKLDAGDTKVLFPAVICKGNERIFSALGNGNVSRGTDEEMQI
GSLDVIVTNHSTGVSRHYFMGSLAESLNPNEAHYCWDEDKSTDEEATALLVVALAVAQ
KEPKANIYLGTGVPVKYYAALKDKYEAELKGTWSVAFRSGPFKGQTRQLTIIRSRVLPQ
SYGVFIKETLNEYGIPISPKLFNGYVVVIDPGFRTTDVATFYDGVMLDPPNSFSIEKGLKW
AYTGVAEQLKEMTINHANPIETDDKELDKVFRVNEGMYPWNNGAINLNPVMQDMLGQ
LGTDISREVKKSLKPMLGKIHTVLVAGKVGEMIFEHLQFENKVLIENPQFGNATGFRIMA
ANLVNNITKKANAAP
Alp25 gi|89894855|ref|YP_518342.1|hypothetical protein DSY2109
[Desulfitobacterium hafniense Y51]
(SEQ ID NO: 106)
MFENDILVAGGDPGFGAIKLDAGDTKVLFPAVICKGNERIFSALGNGNVSRGTDEEMQT
GSLDVIVTNHSTGVSRHYFMGSLAESLNPNEAHYCWDEDKSTDEEATALLVVALAVAQ
KEPKANIYLGTGVPVKYYAALKDKYEAELKGTWSVAFRSGPFKGQTRQLTIIRSRVLPQ
SYGVFIKETLNEYGIPISPKLFNGYVVVIDPGFRTTDVATFYDGVMLDPPNSFSIEKGLKW
AYTGVAEQLKEMTINHANPIETDDKELDKVFRVNEGMYPWNNGAINLNPVMQDMLGQ
LGTDISREVKKSLKPMLGKIHTVLVAGKVGEMIFEHLQFENKVLIENPQFGNATGFRIMA
ANLVNNITKKANAAP
Alp26 gi|168205970|ref|ZP_02631975.1|putative plasmid partitioning
protein [Clostridium perfringens E str. JGS1987]
(SEQ ID NO: 107)
MILGLDIGNITSIGVGDKEDFITESRLREFEELDDFSGNDIVEINDKKFIFNEGYFENNVVK
HEKENFINLLYYTIAKTLDKENSKENDVKIVIGVPAGQYNSEKERLKKVILNNQCKNIKI
NGESRTINIEDIFIAPEGYGAKVEALQAKKEKVKLLMVDIGGGTSDVALFDENGRFIGGK
SIKVGLLDLYKNVQEVLDLKYKLSVSLEDARKYFDGELDIRNEKFEVENTYKTEALNKL
VKFLINELRGLYPNISQYAICLCGGAAGRILPVFKKVYIQAEAITDIKANAKGFRKVGLA
KWQNQGK
Alp26 gi|169342450|ref|ZP_02863511.1|putative plasmid partitioning
protein [Clostridium perfringens C str. JGS1495]
(SEQ ID NO: 108)
MILGLDIGNITSIGVGDKEDFITESRLREFEELDDFSGNDIVEINDKKFIFNEGYFENNVVK
HEKENFINLLYYTIAKTLDKENSKENDVKIVIGVPAGQYNSEKERLKKVILNNQCKNIKI
NGESRTINIEDIFIAPEGYGAKVEALQAKKEKVKLLMVDIGGGTSDAALFDENGRFIGGK
SIKVGLLDLYKNVQEVLDLKYKLSVSLEDARKYFDGELDIRNEKFEVENTYKTEALNKL
VKFLINELRGLYPNISQYAICLCGGAAGRILPVFKKVYIQAEAITDIKANAKGFRKVGLA
KWQNQGK
Alp26 gi|86450171|gb|ABC96280.1|possible plasmid partitioning protein
[Clostridium perfringens]
(SEQ ID NO: 109)
MILGLDIGNITSIGVGDKEDFITESRLREFEELDDFSGNDIVEINDKKFIFNEGYFENNVVK
HEKENFINLLYYTIAKTLDKENSKENDVKIVIGVPAGQYNSEKERLKKVILNNQCKNIKI
NGESRTINIEDIFIAPEGYGAKVEALQAKKEKVKLLMVDIGGGTSDAALFDENGRFIGGK
SIKVGLLDLYKNVQEVLDLKYKLSVSLEDARKYFDGELDIRNEKFEVENTYKTEALNKL
VKFLINELRGLYPNISQYAICLCGGADGRILPVFKKVYIQAEAITDIKANAKGFRKVGLA
KWQNQGK
Alp27 gi|146296416|ref|YP_001180187.1|hypothetical protein Csac_1394
[Caldicellulosiruptor saccharolyticus DSM 8903]
(SEQ ID NO: 110)
MKCGIDVGFGFTKAASEKGKKVVFPSAVAKTFMTDVGLKPTSDYFVTYMNQTYAVGR
AATQCLITETSFSEERFSTDFSKLLVLTALMALECDREVELGLGLPLMLYPKLKEKVKDY
FEFSEEIIINSNGIAHSYHITRCEVFPQGVGALFSISSPVEDGIYCILDVGFRTTDVIVVEIRN
RNINPLLDMCFTVDKGMSLAIERLGLMIERKYGVSYDTSLLFDIHERSHISVRGRKIDIEA
HKKEVFTAIADDIVQSISRRLQRGFDTFDAVLVAGGGAFNVASVLQKEFENVYVLDDSQ
FANAKGYLTLLNLGV
Alp27 gi|146297649|ref|YP_001181420.1|hypothetical protein Csac_2658
[Caldicellulosiruptor saccharolyticus DSM 8903]
(SEQ ID NO: 111)
MLVLTALMALESDREVELGLGLPLMLYPKLKEKVKDYFEFLEEIIIDKNGVAHSYHIARC
EVFPQGVGALFSITSPVEDGIYCILDVGFRTTDVIVVEIKSKNINPLLDMCFTVDKGMSLA
VERLGLMIERKYGVSYDTSLLFDIHERTYISVRGRKIDIEPHKKEVFRAIADDIVQSISRRL
QRGFDTFDAVLASGGGAFTVASVLQKEFSNVQIVENSQFANAKGYLALLSLGL
Alp29 gi|88707200|ref|ZP_01104890.1|bacterial StbA plasmid stability
protein [gamma proteobacterium KT 71]
(SEQ ID NO: 112)
MDALAVGLDDGYAVTKVALATGQLFAVPSRGRIGSAKITAVNQNDTGIAEYMSGDEHI
AVGVDDFDATGFDDYPLSAVNRAIVQHALLAAGLSGRSIHAVSGLPVARFYHSDGQRR
DALIASKTKSLLAPVQPLDGRPPVSIACHDVIPEALAAWYDHVIIEDGTEWVRLDESAVE
APLAIVDIGGRTTDFVVVADEKLWHQSSGSITCGLLDLRGSVAEAICAVHDLDSLSDAG
VDQALTENTIRLFGKDHDVTAIVSKARQQIVLRIEQETRRRLGRGAELERVLFVGGGSVV
LADAIRHWFPNQAIAPHPAFANARGMLKYLRYVGLPSE
Alp29 gi|77164147|ref|YP_342672.1|hypothetical protein Noc_0623
[Nitrosococcus oceani ATCC 19707]
(SEQ ID NO: 113)
MTELTDEKTTDQRQASIADDPMQVVQVGLDDGYAYTKVALPDGRLVSVPSRARMGAA
GVTWIRDVEQRIFEYETAGTVYSVGAVDGEPTQFDEYPGSALNRVIVQHALQEAGLSGR
SLHLVTGLPVAAFYRGDGQQRRQAIQTKRDGLKLTVEPVVAKKSSTRQALKASIAFHEV
IPEALAAWYDFVIVTLDDGVTLDADRLNAPIAIVDIGGRTTDYVVVQDQGVVHGSSGSL
NRGMLDLKLRVANLIQERFDLHELGEQIISRAVDTNRLRLHGKDHDVSDMVMNAKREL
VERLYAETRRKLGLGVELDRILFVGGGSAALSSDIADWFPNQTIADHAAFANARGMLK
YLQFVCDDASKER
Alp29 gi|88706892|ref|ZP_01104591.1|bacterial StbA plasmid stability
protein [gamma proteobacterium KT 71]
(SEQ ID NO: 114)
MTERIDKKPTQADKTSQLTSDPMSVVQVGLDDGYAYTKVALADGRLFSAPSRARIGSA
GVTWIREQEQRIFEYETGGTVYSVGAVDGEATQFDEYPSSALNRVIVQHAFQQAGLSGR
SIHLVTGLPVSAYYRHDGQLRQQEIDRKCESLKLSVEPKPNSAKPGKSILSASVAFHEVIP
EALAAWYDHVIVTQADGVTLDGDRLSAPIAIVDIGGRTTDFVVVQDQGIVHGSSGSLNR
GMLNVKSRVADLIQQTFDMSELGEQSIARAVDSSRLRLHGKDHDISAMVAAAKRELVE
LLYAETRRKLGLGVELDQVLFVGGGSAALATDIANWFPNQTIPDHAAFANARGMLKYL
QYVCDDTAGGF
Alp29 gi|120536986|ref|YP_957044.1|StbA family protein [Marinobacter
aquaeolei VT8]
(SEQ ID NO: 115)
MKTKRRAIDNGYNHHKVAWVEDGKIKTIKYPAILGSSTEAMTELGGGYANMYESTSGE
RFVVDEHVSNRISLRTGDYGLTEGNRVLVNHGLRETGIKPDDEVMLVTSLPVRDFFSSD
GSRNEDLIAGQKESMMKPVKVVLNNTDDPVRVANIVRSDVVSEAVAAAFDFLVDNVG
ESAKPLHAPLAVLDFGGSTFDVVTLTKDLRIRHASSGTLKRGTMDIIEPLKRLLLKHAQE
MKIKVSEIPDWMINQVMATGKMPYFSYEDGKPKNTEMPVNDVIEAAAAETVSEIKAFV
KQKIANFSEYQAVLLVGGGSLLCRKLFRDWEELPQFIVMDEFANARGMLKLVSI
Alp29 gi|126667805|ref|ZP_01738772.1|hypothetical protein MELB17_09158
[Marinobacter sp. ELB17]
(SEQ ID NO: 116)
MKRPLSIAVDNGYYDHKVAYWDGDVIRTFKYPVVIGSKHEVMSTMDGQLVGMYETEG
VRLVVDPTINNKIPLRYDEYGSSKENRTLVSHGLYKAGVAGGQEVHLTTALPFRDFYNI
DGSLNRPLIDAQKANMLVPVSLVASSDGPLDPIANVTQSRVMSEGVAAVIDYLVRDNSG
QARKMRAPIAVMDFGGSTFEVVTVMPNMNIRHSSSDTMKRGTYDIRTSFAPMLADYLR
ELGFKMKHAADWMVTEAFETGSIEFPGVGIDAGNRVIPVKHIIEEAAKPIVNEIKKFTQA
KLPNMAEYEAILLVGGGGLLTESLFEDWKEEFGLIVVDEYANARGMLKVALIA
Alp30 AAAgi|124514596|gb|EAY56108.1|conserved hypothetical protein
[Leptospirillum sp. Group II UBA]
(SEQ ID NO: 117)
MSKTKPVRSPEQEFSEEPVIDVGLDDGYAAIKLAWYGPDGTLRTHSVPSRARSGSLGVG
SLFGDSALSVGGYETEGERFTVSPGLEGEVTRFPDYNLSPLARVLAHHALIAAGFAGKQ
VRIASGLPLDRYFRDGKEGKRKDEHRIARKIESFARPVRRLDGTGTARIVSHSVFAQGLA
AVVDWLVEGTTIRSQKDPVGVVDIGGQTTDISVINPDFQANHGHLKTCDLGVLDVRDLL
GRRIQSSHDVDKISDSALDAALTTGATRIWGKDVSVQDELRDAIREIESRLANEILSVFGK
EASTLETILFVGGGSLVFRNLPTRFPNAAVVDCPEFANARGLLKALSLSGRS
Alp32 gi|167628732|ref|YP_001679231.1|hypothetical protein HM1_0615
[Heliobacterium modesticaldum Ice1]
(SEQ ID NO: 118)
MIKLGVDNGNYNTKSSEGMLYASGYTASDKEFITPDMQLFYEGRYYAIGERRMRFQQD
KTREPDTFMLTLPAIADAMKHAGTTSAEIALGVGLPIGSYGTQKEAFRRYFLRDNVSFLF
EGTSYRCRIAECKVFAQGHAALCRYYPQLKDYRSITLVDIGGYTVDILTLHDFRLDRSSC
ASLRMGTITLYSRIQDTLQRNDILLSDELITDAIRGDIQHADSKLIHAVVEQAVVAYCKEL
LNALRERGLDLRLPTVFAGGGAELLELMLRRSDINTVAVLNRFANADGYKLLMG
Alp32 gi|89897287|ref|YP_520774.1|hypothetical protein DSY4541
[Desulfitobacterium hafniense Y51]
(SEQ ID NO: 119)
MIKLGVDNGNYNTKSSEGMLYASGFSVSDKEFVTPEMQVYFEGKYYAVGERRMRFQQ
DKTKEQDAFILTLPAIADAMKKAGMTYGEINLGVGLPIDSYGMQKDAFRRYFLRDNLSF
RFEGEFYRCRIVECKVFAQGHAALCRYYSQLKNYRSITLVDIGGYTVDILTLHDFRLDRS
SCASLRMGTITLYSRIQDTLQRSGIILSDELITDAIRGESQHADSKLIGAVVEQAVAAYCK
ELFNALRERGLDLRLPTVFAGGGAELLKPMLYRDDLNAVAVLDRFANADGYKLLMG
Alp33 gi|85859495|Syntrophus aciditrophicus SB]
(SEQ ID NO: 120)
MQMNLGLDVGYGDVKAVYQREGILEMLKFPTAIAYAEREVGDLSAFAGGEEYEYRGR
KYFVGREALVGAFSTRSFEFMKRYSPLFVFKAVKKIHRRTGELVTDVAMGLPLSHYTEA
NLKELVPLLQRIEVGREVLELNARFYPQGLGVLADYRLSQAGDVNARTDRDMIILDIGF
NTVDVIVVERGRIVKGESDTLERHGVSKISLDLAREIKVRMQLDLSEQESKDVLRQGRIR
VYGAERDLAELVRESAEKYMDWLIQEVHSKWMARIQRAEKVIIAGGGAYYLQEHIPEE
YLPLVHVPDHPEYANARGFLKALDVESGK
Alp34 gi|134288378|rBcep1808_6851 [Burkholderia vietnamiensis G4]
(SEQ ID NO: 121)
MQNQTIIGLDVGRSAVKATAFASGMFYPLTFPSIVSPAIDLTDESTARKAEAETIVVAGR
RYFTGDTARLQGSAGTTVGLSHNWTSTPEYLALVGSTMKRFAAKGVPGLTDPLLVIGTP
ASLYGSQQEQLKAETLKIVQAEIRVLPQPMGAYCDFYLDKSGVPVKTHMQDDAGRKKS
WAVIEVGHFTTDFLLMLEGQYIERGASSCEGLNFAAEHLLRILNAKDIHSNLIECELAIRT
KTILQYGRDVDIAEEVAEAVSHVAQKIISKADSLLSTDVRKLHGVLLAGGGAPLLYDELS
KKWPHCMLLDNPRMAVANGFCRYGMGIALRRAMRSQQESVNV
Alp35 gi|118443715|ref|YP_879207.1|NT01CX_0741 [Clostridium novyi NT]
(SEQ ID NO: 122)
MSKGNNIVDSFSVQVIDDGYADTKSRGEDTNMIVTPSYVTSWRPSYNKDNDLQEEKIDK
LSRIEVKVNGSKYLVGQCAVKQDRNIQWNGAADKHDDTSFDILLKTHLSLLNKKPMSR
VKLVMGLPVSASLDKERIEKMKAKVLRQHNSALRLYGDKDFQNKIVKVEDLIIKAQPH
GTLCDLILDSSGNLTNKDLARKVNAISDIGGKTHNLYLVDALEPLSDFCDTKNSGMYIA
YMWIKNYIEQELHLNVSDGQIQYIVASGQIKGYDLTPVIQKAYRSLARKIILEIRTVWEN
AFPFIDNIIFTGGGATVLKPYLQEEFKNAMYLTRNQNASGLFKQGIRKWKRKAV
Alp35 gi|168187430|[Clostridium botulinum C str. Eklund]
(SEQ ID NO: 123)
MSKGNNIVDSFSVQVIDDGYADTKSRGEDTNMIVTPSYVTSWRPSYNKDNDLQEEKIDK
LSRIEVKVNGSKYLVGKCAVKQDRNIQWNGASDKHDDTSFDILLKTHLSLLTKKPISRV
KLVMGLPVTASLDKERIEKMKAKVLRQHNLGVRLYGEKEFQNKIVKVEDLIVKAQPHG
TLCDLILDSSGNLTNKDLARKVNAISDIGGKTHNLYLVDALEPLADFCDTKNSGMYIAY
MWIKNYIEQELHLNVSDGQIQYIVASGQIKGYDLTPVIQKAYRSLARKIVLEIRTVWENA
FPFIDNIIFTGGGATILKPYLQEEFKNAMYLTRNQNASGLFKQGIRKWKRKAV
Alp36 gi|150019823|[Clostridium beijerinckii NCIMB 8052]
(SEQ ID NO: 124)
MRISADIGYNTTNFIGHNIEGSFSSTVKEKMHELETAKYTVEYNNKTYLIGNDDGFTSIEH
SRDKDIIFHICLYTAIAATMSSTIDNNVRVITGLPAQFFAEQKNSLIKALENRRVFMKLNG
ENRSFTITKVIVFPQSAGLFLYDKSLVEKDTLVVDIGGGTLDIAYMSNGQFKEGRTYPLG
VNPTYDVLLQELTKYGVNYSNRMKAEQIIADKAIFVEGKEIDVSKDIDNVLSLRAGEIIN
AIKQAFPEQSKYSRFVFIGGGALLLKNYLKDYRVLDDAQMINVKTYDIIGKSKNV
Alp37 gi|83589213|Moth_0345 [Moorella thermoacetica ATCC 39073]
(SEQ ID NO: 125)
MLAIQTNPQPAALAIDVGFGYTKAVSSTGGKVIFPSVVAPAGSPDAFDRLDKSDTGYRV
RIKKGIDGLLEEWLVGELALKEGREVQYFQDWEKHSHPAHDAVLLAAAVLTWNWPRA
GSGIMGISNPALVVGLPVDVWRDELQREGLKKHLAGLAAEVSVNGNDPVRVTFSRVYV
YPQAAGAFLTVPDLPDSGIVALVDVGQKTTDSAAIEIVNGRQRLVKTMCFSINKGMAAL
VEAVREEFRRQTGAPLPPQQAWETVKSGSLWYRGKQIDMAPAIKKARSEIARAIADQVL
AGWGERADFVRKVYLAGGILDLPDLKNMFPAAAVLPGPQWANALGFLKVARGLAV
Alp37 gi|34298835|ref|YP_001112331.1|hypothetical protein Dred_0971
[Desulfotomaculum reducens MI-1]
(SEQ ID NO: 126)
MSKVVAIDFGYREIKGVNSEGLEIKFPTAMAPYVKHPTAEGLEEVVTVTKPGYEPEMYF
YGQKALDETGVGFTNDRDKHLHSGHDILMLAAARKLGYENGDTLVVGVPISYADQRE
ALKTQLERLHGDVSVDGGKPKRISFNDVLVLRQGIVVFGLIPDLPNGTLISFDIGEHTTDV
STVKFKNGVIEPNPSKCFSLEYGYSKVVEAIQKEFQSKAGSPVSGEQARAIAEEGYVIYK
LKKLDMTLEVLRAKEEIAKNIVKDAKKRLGEIADFAAGFYLCGGGADVLPLKELLPGAV
IVDNPQTANARAYLQLAMSE
Alp38 gi|167630473|HM1_2411 [Heliobacterium modesticaldum Ice1]
(SEQ ID NO: 127)
MNMHAARLRQLPGFEPGEGKNLTVGLDIGFGYVKVVAGNGRWALFPSIVGEGRELHIL
SGFGSNDPIDNLVVDVDGRRYFVGNLALRETEAELDIDPDKIFNIDFEVLVYTALALVSD
KSDQDVNIYLGLPINFYRTQKARFEDKLRAHQMSRFVKILGQDVRLIRIGNFEIFPQAGG
AIFNQILDFRSEVRTPRLARGKIGIIDGGTKTTDCIYMEDLKFVDQRSFSVNDGGTHKILM
DIRDFLMKNFDHYYPRLAEVDQMLRERKVEVKGKVYDLSSVIDASASRVARKIVREIAA
KWPNHMEFRAMILVGGGGYVMHPFLKEIFPDILLVQDEFEGEAVTGGWNVIQFANALG
FLKLAVMRYGEKK
Alp39 gi|160933403|ref|ZP_02080791.1|hypothetical protein CLOLEP_02249
[Clostridium leptum DSM 753]
(SEQ ID NO: 128)
MNKTMNIGIDHGYYAIKTRHFSFPAGISEYSHEPYTLQNTLEYGGKFFVCGTGRQPILRN
KMENENYYLLTLAAIAKEIQQRGAKTECSVTIAAGLPLAGFGREKKSFREYLRPSSQPVS
FQFEGIPYKVTIEDVKLFPQGYSALMIHPELLQNEPSVLLMDIGGWTVDLMRLDNNVPN
AATCRSLELGMIRCIDEVKEQVRRDVGLSVTDAQVERVLAGKPCSMDEDARGIIQKQGR
LYTERLLSAAMEAGFDLKAIPVVMLGGGAAVVKRNVAPQDGLCRVFALLDDRVNAEG
FERILGRLSGGVGKG
Alp40 gi|168697294|ref|ZP_02729571.1|[Clostridium difficile QCD-37x79]
(SEQ ID NO: 129)
MSKLGIDIGNYAVKTSTDDIFESKVTEVKNFGSDSDSIKIGNKTYYLGEGDEEINIVKYEK
ENFLPLLLGAICRNTDDEVIDLALGLPVKQFGGLRKDLIEKLQGKEYHVEFEKGNETTKR
DITIRSVQVFPEGVTGYLYYAKDIVDQIAGRDVVLVDIGGKTTDIALVQGNKATDPYSV
NVGTINIYDAIKKSLEMDERFLGKVEIKREKIQDYIDKGFYLNGEKQDIKKNIDASVGLF
KQIYNELKLNYPISTSAVVVMGGGAKLLGEAFKKNIPGIIVMSDVDKHVFANAKGYKK
MMK
Alp40 gi|168206996|ref|ZP_02633001.1|hypothetical protein AC3_A0270
[Clostridium perfringens E str. JGS1987]
(SEQ ID NO: 130)
MKIIGLDIGNAEVNTSEGVHFPSRVKIGVNNMNKDDIKVNFEGLDFTIGQGSNNIGLNKY
KNINFKISVLVGIAKSFKENDIECNVVIGCPIETFNKNKEIVKDIKGIIESWGKQTIVIEQGE
SKEIKVIDIKNVAIFCESGIVFKNRERFSKEKTLVVDIGGGTRDDSLWNGLDLVECKSND
KMGMINLYETIIKEVNRRNKSNLNFDDAKAMIGKKEYKINQEIVDISYIDIIIENFVTGFM
SEINQIFPFSNVDSIQFVGGGAILLKEYITRLIPKAEVPNNAEFLNAETYREVGELMWS
Alp41 gi|30262713|ref|NP_845090.1|BA2740 [Bacillus anthracis str. Ames]
(SEQ ID NO: 131)
MSILLKAGADAGNNGLKLMVKGQDPIFIPSIYALYIGEPTGLLDEGDVSLSELENHIDVTI
SSPSLMLNNVRYIVGEKVIQDQLKGTEVEKKSNKSTDELMVITILSGLAVSAMRQSPTSS
HINIRYDLSVALPMQLITQEIAAENAKRYMGNHKVVFHYPNGRDVTINISIEYCKCLPEG
ASGTWGIVYDEEGNVVKHKIECEQNKVSEIDFVDKTLLSFDIGAGTTEEVVSLGVNFRPQ
LSKGLSYGVKETLLQIITRWNRKYPTKTIDSITEFNQIYLNDKHPRNALLVEESQPALLGL
AARVATDIINKIDDMKDDPYVFIYGGGAVIIKNSLKMILKQKGRLTNVIFVDNPLFTNAR
GLLVYTCSPKYREHKQKELGFTNLTIS
Alp41 gi|166985867|ref|ZP_02257138.1|hypothetical protein BcerAH_25982
[Bacillus cereus AH187]
(SEQ ID NO: 132)
MAILKAGADAGNSGLKLNVLGLDPLFIPSIYSHHIGEATNILSDEDISIEELENNIDVTISSP
TLKANNMRYIIGQKVIDENIKGIEMEKKSDKSKDDLVLLVTLAGLAISAMKKHPNKNKI
DVTYDLSVALPVATITPQTAQGFVERYMNHHTVKFHHPSGREVVVNIQVEFCKCLPEGA
AGSWGIVYDEKGKTIKRKVETTEDKTTEIDFVDKTILSFDIGAGTTEEVVSHGVSFKHKM
SRGLPYGVKETLLDIIKVWNLNNKQKTIDSIAEFNAIYLDSEHPRHIRLKEASRGALLGLA
NRIATDIINKIDDMKDDPYVFIYGGGAAIVKESLQQILEQKGRLTNVIFLKDPLFVNARGL
LVYTCSPRFEELKEKALAPVGEK
Alp41 gi|168163020|ref|ZP_02598253.1|hypothetical protein BcerH_23221
[Bacillus cereus H3081.97]
(SEQ ID NO: 133)
MSNVKEKEDFLREDEELEMLTKAYKMDSAFDVGNANVKAKINGKVLKQPSVIQYLLQ
QPPVTETNLTKLVSNLEDELTVHITSNAIKRSGLYNIGKRATITSDANVENMNIKLGNKY
KHTIPVVMTLGMMACESVKQAFSEESKLPSTINIKSKLSTAIPMSEYTVDKAKFLEDRFT
NNKHIVIVYVGGESVTVSITFEKVKVTKEGVPPLYALIEGEQAILDIYNEQYQEKAVPKD
FVNKKILHADIGDGTTEYVYTVGLNPVPDNCTGERRGVGHATESAIALLKEDTNGRVLL
KRQQYMNILKDPSHRLFDEASRFLENGKYIQAMRILEDIQEKYTEKIAGDADIICVYGGG
SIEFESLLYDDLLEFCEEVNCKLLWIPEKYAVDMNMEGLDILNKKVFFKKG
Alp41 gi|169636508|ref|YP_001716049.1|pGS18_ORF52 [Geobacillus
stearothermophilus]
(SEQ ID NO: 134)
MKLVVANDIGNSETKMIVNDTLIKQPSVVKRLLSKPNVMETNVEKNIANLLDELIVHVT
SNAMKRSGLYFIGKRANMTADKVENMNIKLGNKSKHDIPVLMTLSMLAARSVQLAYQ
ENQELPSSISVDVSMTTAIPASEYSADQARYLEGRFTSNDHVVIVYVGETPVTVTLHFQT
VKVTQEGIPALYALLESENEILKNYNEHYKKQAVPKDFANKRILHVDIGDGTTEYIYTVG
MNPVTDVCSGEKRGVGHATEEATQLLKEEVGGFLNLNRQQFMDIFRDPSHNLHDLAVR
FMQEARYSQAQRILEDIQEKYSDIAGNVDVIAVYGGGSIQFKEELYEELLDFANTVHCEV
LWIPEKYAVDMNVNGLHVINEKILFKQHA
Alp41 gi|23100549|ref|NP_694016.1|OB3094 [Oceanobacillus iheyensis
HTE831]
(SEQ ID NO: 135)
MTKSRIAAVDVGNDALKGNYGKLENELYIPNVIAPDLEERPVIGIEELDDKEILENIHIRIH
SPALSENNLIYRVGSLATKTTNSQELDQGSSKSEEDQTLIMLLTSLALDAVSASDFEEKN
GVIDANYTLGTGLPLREVKEGKDVAYRSHLLSSVHQIEFLVTPKYQGKKVNIKFDEVKV
YPEGFAAYVNLIMDNDLKVINKDIIDKQILIQDIGGLSTDIAVIRNRNVDDDKAQGFNLG
VSESLEQIREEIRTKHGVELDSRRDVVDIITRKNDRNHIMVKGSRTNVHDITDHILLELAK
KEYRYLRNVWAKNSQSEICYFVGGGSAVLKDYIKALNNKLDGYNIEFFEDENESIWMM
ANAYYKLITDFVQKSSPQVVEKEKKTTKSK
Alp41 gi|168206979|ref|ZP_02632984.1|[Clostridium perfringens E str.
JGS1987]
(SEQ ID NO: 136)
MCIYFKVGNDNGNSEHDIIINDKLIAQPNVYSKVRKLPNLDEVNKEYVLEHIEDNLIVTC
EDPSGIYYIGNYALSSGQKIRNVEVGIDNNKLESEVIVINTLAQIAGQAVKEYYLKNKSFG
DIIKVKVDMATALPISSYSNKNAKLFSEKFTNKKHFITVHIGNEVARVEIEFEFVMVIPEG
VTSSFLFIQTDDALKKYNFKKEFFKNAKVLHVAIGEGTVEYPITKGIEFNPNFIKGSNNGV
GHAIDMALDEFKETKGLIKFSRQDYSEVLKNKKHKYNELAEDIIEQYIEEQAEEIFHNAT
KEIQKANNDIDVVCIYGGGSILMRSALEEKFKKFCDRADIKLLYFDKEDCVTLESLGLNV
LVNSKLFKTLKQNSTVKN
Alp41 gi|89096483|ref|ZP_01169375.1|B14911_12622 [Bacillus sp. NRRL B-
14911]
(SEQ ID NO: 137)
MVDLKNPRIAAVDVGNDSLKALFGKLDYELNIPNVIARDVADRPVIGIEELDSKEPLDGI
HVKVHSPALKDNNAIYRVGTLATKSDNASELDPGSSKSEEDQTLVMLFVSLALDAVREE
NAGLFPKNNNIIDTNYILGTGLPLREVKEGKDAGYRSKLLGSVHQVEFLVTPKYQGIKV
NLKFSDVKVYPEGFAAFINLVMDNDLNIINKELIDKRILIQDIGGLSTDIAVIKNRTVDDD
KAQGFNLGVSESLEMIREEIRSKHGVELDSRRDVVEIITKKNDRNHIMVKGSRTSVHDIT
DRILFDLAKKQYRLLRNVWQKNSQTEICYFVGGGSAVLKEYIKSLNNSLDGYNIDFFED
EKESIWMMANAYYKLVADHLKRTSKPDKQDEKKPVKA
Alp41 gi|138898362|ref|YP_001127547.1|GTNG_3469 [Geobacillus
thermodenitrificans NG80-2]
(SEQ ID NO: 138)
MKLVVANDIGNSETKMIVNNTLIKQPSVVKRLLSKPNVMETNVEKNIANLLDELIVHVT
SNAIKRSGLYFIGKRANMTADKVENMNIKLGNKSKHDIPVLMTLSMLAARSVQLAYQE
NQELPPSISVDVSMTTAIPASEYSADQARYLEGRFTSNDHVVIVYVGETPVTVTLHFQTV
KVTQEGIPALYALLESENEILKNYNEHYKKQAVPKDFANKRILHVDIGDGTTEYIYTVG
MNPVTDVCSGEKRGVGHATEEATQLLKEEVGGFLNLNRQQFMDIFRDPSHNLHDLAVR
FMQEARYSQAQRILEDIQEKYSDIAGNVDVIAVYGGGSIQFKEELYEELLDFANTVHCEV
LWIPEKYAVDMNVNGLHVINEKILFKQHA
Alp41 gi|182624909|ref|ZP_02952688.1|[Clostridium perfringens D str.
JGS1721]
(SEQ ID NO: 139)
MCIYFKVGNDNGNSEHDIIINDVLISQPNVYSKVRRLPNLDEVNKQYVIENIENNLIVTCE
DPSGIYYVGNYALSSGQKIRNVEVGIDNNKIESDVILINTLAQIAGQAVKEYYLKNKSFEE
IIKVKVDMATALPISSYSNKNAKLFSEKFTNKKHFITVHIGNEIARVEIEFEFVMVIPEGVT
SSFLFTQTDDILKKYNFKKEFFKDAKVLHVAIGEGTVEYPITKGIEFNPNFIKGSNNGVGH
AIDMALDEFKETKGLIKFSRQDYSEVLKNKKHKYNELAEDIIEQYIEEQAEEIFHNATKEI
QKANNDIDVVCVYGGGSILMRSALEEKFKKFCDRADIKLLYFDNEDCVTLESLGLNVLV
NSKLFKTLKQNSAV
Alp41 gi|75758838|ref|ZP_00738951.1|hypothetical protein RBTH_04478
[Bacillus thuringiensis serovar israelensis ATCC 35646]
(SEQ ID NO: 140)
MASLKGKTLHIDIEGDIGNDSFKGYINGEYIKMKNVYQSVYSMPNVTETNIQKNVVNLV
DNMFVNIASKSIRRSGMYFIGNRAMLTGKNPKNMNIKVGQKYNDDLPLINMLGLIANKS
VQLEWERTEQLPQSINVTVDLISAIPASQWTPVNAKHLEQRFTNSNHVVVVYVGEEQVT
VSLTFNSANITQEGVPPLFAILEGEEEMFTDFTKLYAKKLEIKKIDGAFFKNKKILHSDIGD
GTTEYIYTVGVNPVIDACSGERRGVGHATEEAVKLLNQERGTNIKRQQFSQILQDIDHKY
HEEATTHFNITKVEQAELILEDTDEKYVNNTASEAEVLCVYGGGSITFKDELYNQLLEYC
ERVGMYLLWIPEKYAVDMNAKGMQIIKKILSRKKVK
Alp41 gi|167939412|ref|ZP_02526487.1|hypothetical protein BcerAH1_24731
[Bacillus cereus AH1134]
(SEQ ID NO: 141)
MAEKNLVSEVKEVESVVEKKVVAEADLGNSNLKIFINDKYLSVPNVFQRVHGGVDSYE
TDEQKNVINLLDDLHVHVTSEAIERNGSFFVGKRAMRNSEKMKSMNIKVANKHEEDLP
VINTLSVIAANVIQSVYEEAKSVPDLLKVELDLMTAIPASQHNPKTAEILSERFSSNTHVV
IVYVGKKAVTVQIECSRVRVTKEALAALYAITEGPDEMFEEFQELYAEQLNNEKITGKFF
KDKKILHGDIGEGTSEYIFTDGLSPVLDSCSGARRGIGHAIEEACNLLNKDRKTNFKRQQ
FTEIMLDKNDKYNEDATEFIYETRYEQAELIKEDLEQKFINDTGGRAEILAVYGGGSIAL
KNELFNKLKKFCETTGMMLLYVPEKYAIELNPKGMNVLRKIID
Alp41 gi|168205266|ref|ZP_02631271.1|conserved hypothetical protein
[Clostridium perfringens E str. JGS1987]
(SEQ ID NO: 142)
MTVKEEKIMKMSNDNGNGDSKIIVNGALTIQPNIIHKKGFETPETGGWNISKIKNLKNNL
IIGVFEKPEINFFDEEDTEEEVESIYFIGSYALQSGLKTVGLNIDVDEDKMKNPITVISTLGY
AAAQAVKERVLDLEKSLGRPFAIEDIDSIGDLDLKVDLTTSLPARIYSLDKADTLASKFK
NKEFKLKIYVPNNKFVNVKIKFNNVGVVSEGVTTVYYLANIKNNIFDEFNKNNDDVKID
NEFFRNPNNTILHVAIGAGTTEYPRTNGYDWDDVYKTGSKNGTGHAIKDALKVLDKID
GTQNIRNPKAIERILKNKGKEKDGTKNLFYNEIKKSLTMPLMTQVDEIMDHIIEELNRGP
QISLVVIYGGGSILMKPILKKRIMELQETRRLKFLYIPEEYAVNLEAYGLYTLVSSPDFAG
NSSLRSK
Alp41 gi|167939846|ref|ZP_02526921.1|hypothetical protein BcerAH1_27045
[Bacillus cereus AH1134]
(SEQ ID NO: 143)
MSILLKAGADAGNNGLKLMVKGQDPIFIPSIYSLYIGEPTGLLDEVDVSLSELENHIDVTI
SSPSLMLNNVRYIVGEKVIQDQLKGTEVEKKSNKSTDELMVITILSGLAVSAMRQSPTSS
HINIRYDLSVALPMQLITQEIAAENAKRYMGNHKVIFHYPNGRDVTINVSIEYCKCLPEG
ASGTWGIVYDEEGNVVKHKIECEQNQVSEIDFVDKTLLSFDIGAGTTEEVVSLGVNFRPQ
LSKGLSYGVKETLLQIITRWNRKYPTKTIDSITEFNQIYLNDKHPRNTLLVEESQPALLGL
AARVATDIINKIDDMKDDPYVFIYGGGAVIIKNSLKMILKQKGRLKNVIFVDNPLFTNAR
GLLVYTCSPKYREHKQKELGFTNLTIS
Alp41 gi|30020866|ref|NP_832497.1|hypothetical protein BC2745 [Bacillus
cereus ATCC 14579]
(SEQ ID NO: 144)
MSILLKAGADAGNNGLKLMVKGQDPIFIPSIYSLYIGEPTGLLDEVDVSLSELENHIDVTI
SSPSLMLNNVRYIVGEKVIQDQLKGTEVEKKSNKSTDELMVITILSGLAVSAMRQSPTSS
HINIRYDLSVALPMQLITQEIAAGNAKRYMGNHKVIFHYPNGRDVTINVSIEYCKCLPEG
ASGTWGIVYDEEGNVVKHKIECEQNQVSEIDFVDKTLLSFDIGAGTTEEVVSLGVNFRPQ
LSKGLSYGVKETLLQIITRWNRKYPTKTIDSITEFNQIYLNDKHPRNTLLVEESQPALLGL
AARVATDIINKIDDMKDDPYVFIYGGGAVIIKNSLKMILKQKGRLKNVIFVDNPLFTNAR
GLLVYTCSPKYREHKQKELGFTNLTIS
Alp41 gi|168157476|ref|ZP_02592709.1|hypothetical protein BcerN_24266
[Bacillus cereus NVH0597-99]
(SEQ ID NO: 145)
MSILLKAGADAGNNGLKLMVKGQDPIFIPSIYALYIGEPTGLLDEEDVSLSELENHIDVTI
SSPSLMLNNVRYIVGEKVIQDQLKGTEVEKKSNKSTDELMVITILSGLAVSAMRQSPTSS
HISIRYDLSVALPMQLITQEIAAENAKRYMGNHKVVFHYPNGRDVTINISIEYCKCLPEG
ASGTWGIVYDEEGNVVKHKIECEQNKVSEIDFVDKTLLSFDIGAGTTEEVVSLGVNFRPQ
LSKGLSYGVKETLLQIITRWNRKYPTKTIDSITEFNQIYLNDKHPRNALLVEESQPALLGL
AARVATDIINKIDDMKDDPYVFIYGGGAVIIKNSLKMILKQKGRLTNVIFVDNPLFTNAR
GLLVYTCSPKYREHKQKELGFTNLTIS
Alp42 gi|19552885|ref|NP_600887.1|hypothetical protein NCg11611
[Corynebacterium glutamicum ATCC 13032]
(SEQ ID NO: 146)
MTSAVNVQKKTTQKVLKPINTKNYSATDAVQTGQHGSALGSNIGVYTYTAGLDIGNGY
VKGIIEATGDTTGTSVDVIDMPSAATRMSRPTEVPEPDDTAVAVTGADFFNHIDTNFNSP
MVKGNYRYLCGTRSLSARGSLEEFDLVGNRSKAEQELSKVLVMAVLAAKAVKDFVAA
HGRIPQVAVEGDPGVLRVHTYLALALPINEYVGHRHGYKAQFMGDGAANPAVHVVTV
NNFETPATVQLIFERVEVIAEGASAQYAITAGGEVLMNGMLADVRSKGLALEGVTAGD
VLQARHTIGVDVGEGTVNFPVFTDGRFNHDASRAYDKGYGTVLESAIQAMDDAGLAH
NFNSRKQLADYLQRPPSALKRNFYTRVEQHVDQEAVFFVQDVAAEFARVLSDVGALTE
VAFVYGGGSGPLRDRLHEALLIKAAEMGSEDTFPVLYLDSAYSRKLNREGLMIAARSIA
AKARK
Alp42 gi|90962843|ref|YP_536758.1|pMP118 LSL_1868 [Lactobacillus
salivarius UCC118]
(SEQ ID NO: 147)
MSKNNILKLNVANDLGYGSVKAKVEDTNIHFPSVIAIQREQDLNKPVEFNSNQEKLTYL
EGMINHMDVTISSSAVKTQGRFLVGNAAIKSSLPLKAFDVNDFTGKSDNDLAIILTLSMI
AAQRISLAVKNGEDLSDQLSTEINMTTALPVSEGKKNGIINNYVNKYISSKHTVVFHNFK
DPITVSLNFKNVYVALEGEVAQLYLKNSDIKLQGLIKQDFSKNYPELANDIKVSDLVKID
NLLGIDIGEGTTDLVVIKEGHANAVASTSLPTGYGNALQDAIDVLQTENMNFEARSQLQ
DYLAQEVSPLAKRMQTKVRQIVFEQLEPFADKIVTAASKTMRKAGANVEILYVYGGGSI
PMLEQTALRQKLSQKMKDFSGGIDVPVIWINKSYAQNLNEKGLELILKAMNK
gi|254850896|ref|ZP_05240246.1|conserved hypothetical protein [Vibrio
cholerae MO10]
(SEQ ID NO: 148)
MFVLGVDIGYSNLKLAIGQSGSEPKTIILPAGAGPADRMPERIGGGDDETCLYVSVDNER
WAAGVPAGRLQGWERELHPEYPTTKTYKALFHAALLMAETESIDLVVTGLPVSQFHEP
QRKSDLVKRLKGVHQVTPKRSITVHDVKVLPQPAGAYMDLVQTGGDLGLIEEGRVVVI
DPGFFSVDWVALEAGEIRYSSSGTSLQAMSVLLETIDKLISEDHGAKVGMDRLEKAMRT
GDLQVLLFGEKVDISPYLNAAMKKVAPVALTAMRQSMRDESINADLVLIAGGGAMAY
KEAAKEIFSRSKIIVPEQSVLANVRGFWFYGA
gi|65320431|ref|ZP_00393390.1|hypothetical protein Bant_01003833
[Bacillus anthracis str. A2012]
(SEQ ID NO: 149)
MKSLYAIDVGIGFTKRVYRQDEDSEVTVKSEASTLAPVPNHDESEDLTKVSFIDLDFAYY
MGNEAHQSDASFLPPFEEEIENYYESEQFKQQIFGCIAKDYKENVVLPLVVTGLPVTYFG
SQHEQLQRALKKETSVQIDGKFIHITVENALILQQPVALHAYFLKEGIIQERDRILIIDGGF
RTLEMTDMKQNVILNHYETELGCSKPLKNIKNIVQNHAGESDHLHINDMPNILEKGYGG
REEDPQTNQVHILIQKERMHTSKTLCVYYKNNLS
gi|113477981|ref|YP_724042.1|hypothetical protein Tery_4593
[Trichodesmium erythraeum IMS101]
(SEQ ID NO: 150)
MVIKQPAAAAMLTQKPSNINKKAILSADLGRTATKACVSRTQNGVVFIPSNVKQLSVDQ
VRAGNFESKPTDPLLDMWLEYQGYGYAVGQLAADFGANLFGDERSFAKSKIEDALVK
VLACAGYFQLKGEFSVVIGLPFYNQEQFEKEKAQIISQLESPHQMFYRGGEEVEIRINKV
WVMPEGYGSLLWTEANHGKEFQPQLPKLSLAIVDIGHQTTDFLMVDRFRFARAASKSE
PFAMSQFYEDVASKIEGADSQSLYLLEAVHKPEGQRSYRPKGATKPINLDGIIPELRKVF
AAKLCDRLIKWIPERVSDVILTGGGADFFREDLEKLLQEAGLKSHLAQPPREANALGQYI
YGEAQLAISK
gi|186686689|ref|YP_001869883.1|hypothetical protein Npun_CF030 [Nostoc
punctiforme PCC 73102]
(SEQ ID NO: 151)
MINIYCADIGNYSSITALKGEKPRVMRSVFQDVTYTSARDLDTDNSPSIKLDDKVLVLGD
RATKQKNSQTAAERGKDLPEFFKPFTLAGLRQDFDGVVRFLVPEHSQWHEDTIRRTLVA
EHQINVNGTNYRHRIKNVEFFLETDVAVINAYRNGKLDMDGDTLAIDIGGGTTNYVVIT
PSSEVLTRRSIPKVGGVSLANDIINSDLMQSYAKRDNVAFKVAKMMDAIADGSFTYGRK
YDFSSVFPGLLENWFNNLMDSISTAANDYLADVTNVMLIGGCANLVRQKLSAKQGFYIP
ANPQLSNIQALLAM
gi|186684586|ref|YP_001867782.1|hypothetical protein Npun_R4472 [Nostoc
punctiforme PCC 73102]
(SEQ ID NO: 152)
MTDQPSAANPMNSAAIPMNRQPLASTTPINAVNNNPPTTTKSGGGSGKTILSVDLGRTST
KTCVSREPGSVVFVPANVKQMSIEQVRGGVFEARATDPLMDLWLEYQGNGYAVGQLA
ADFGANLGVGQSKVEAALVKVLASAGYFKLRDDISVVLGLPFLSLEQFEKEKAQLISQV
GGPHVLNFRGESISLNVSKVWVMPEGYGSLLWSEAQPKKSPSSPDFTKISVAIVDIGHQT
VDLLMVDNFRFARGASKSEDFGMNKFYELVSAEIEGADSQSLALISAVNKPRGERYYRP
KGASKPTNLDDFLPNLTEMFSREICSRVLAWLPERVTDVILTGGGGEFFWDDVQRLLKE
AKINAHLAAPSRQANALGQYIYGEAQLSSNRAARA
gi|30262713|ref|NP_845090.1|hypothetical protein BA_2740 [Bacillus
anthracis str. Ames]
(SEQ ID NO: 153)
MSILLKAGADAGNNGLKLMVKGQDPIFIPSIYALYIGEPTGLLDEGDVSLSELENHIDVTI
SSPSLMLNNVRYIVGEKVIQDQLKGTEVEKKSNKSTDELMVITILSGLAVSAMRQSPTSS
HINIRYDLSVALPMQLITQEIAAENAKRYMGNHKVVFHYPNGRDVTINISIEYCKCLPEG
ASGTWGIVYDEEGNVVKHKIECEQNKVSEIDFVDKTLLSFDIGAGTTEEVVSLGVNFRPQ
LSKGLSYGVKETLLQIITRWNRKYPTKTIDSITEFNQIYLNDKHPRNALLVEESQPALLGL
AARVATDIINKIDDMKDDPYVFIYGGGAVIIKNSLKMILKQKGRLTNVIFVDNPLFTNAR
GLLVYTCSPKYREHKQKELGFTNLTIS
gi|117676207|ref|YP_863783.1|hypothetical protein Shewana3_4268
[Shewanella sp. ANA-3]
(SEQ ID NO: 154)
MNNPVIITVDVGYGTTTCVHKESLGNYSVKTFPSLPIPIKSDINLGLAGEERDVTNVEVD
GITYEVGSDVGTSVGSRNVRVLNTESFITSDRYKALLFGALSFLGKSNHIDIDVLVLGLPV
SVMFRKDELAKIYTGTHQITPSRKVTIRQVLVFEQPLGALMSFLRQGGNERFAQCKDKT
MLSIDPGYMTTDFITSKGLKVSPNRSGDSETGMSKVIGAVEVALRSQLEGFNIKQINPELI
DQAFISGELKLYGKAMKFPKCDLFDVTSAIRSVTDEALTSVVNKVGDGQDIDLIIVSGGA
AAVYLPSIQRAFPFHKIEVVDDSLTAVARGLQTAGEQFIRGAIARGDYQKLKAV
gi|134287988|ref|YP_001110152.1|StbA family protein [Burkholderia
vietnamiensis G4]
(SEQ ID NO: 155)
MTKNAAVSEEVGNVVHLQPEGEVRFAGTDDGHDGIKIVTDDWRQIHVPSRITRGADLIS
LNDADDNVYEGPDGTLYAVSPTLPYFDTTFSDYALSDINLVLVHHALAKAGLGGQRVN
LVTGLPVGDYYVANRPNVDFISRKVAHLRENTVRNKNESVALATIVKHNVVSEAIAAFF
DLLLDREGNQRDDVAEMVATGGIAIVDIGGKTTDTAVVMNGGRDVDGKRSGTDPIGGL
SLNKAVENELKAEFSVTALNPAQVDRAVREGVLRLYGKDHDCRAIIDKQKSELAKQIIA
ATHRKMRDASDLERVFFVGGGALLLCDQLEELYQHAEFVEDPQFANARGMLKAAMFL
QPR
gi|134288378|ref|YP_001110541.1|hypothetical protein Bcep1808_6851
[Burkholderia vietnamiensis G4]
(SEQ ID NO: 156)
MQNQTIIGLDVGRSAVKATAFASGMFYPLTFPSIVSPAIDLTDESTARKAEAETIVVAGR
RYFTGDTARLQGSAGTTVGLSHNWTSTPEYLALVGSTMKRFAAKGVPGLTDPLLVIGTP
ASLYGSQQEQLKAETLKIVQAEIRVLPQPMGAYCDFYLDKSGVPVKTHMQDDAGRKKS
WAVIEVGHFTTDFLLMLEGQYIERGASSCEGLNFAAEHLLRILNAKDIHSNLIECELAIRT
KTILQYGRDVDIAEEVAEAVSHVAQKIISKADSLLSTDVRKLHGVLLAGGGAPLLYDELS
KKWPHCMLLDNPRMAVANGFCRYGMGIALRRAMRSQQESVNV
gi|47564291|ref|ZP_00235336.1|conserved hypothetical protein protein
[Bacillus cereus G9241]
(SEQ ID NO: 157)
MKSLYAIDVGIGFTKRAYRQDVDSEVTIKSEASTLAPIPNHAESEDLTKVSFIDLDFAYY
MGNEAHQSDASFLPPFDEEIENYYESEQFKQQIFGCIAKDYKENVVLPLVVTGLPVTDFG
SQHEQLQRALKKETSVQIDGKFITITVENVLILQQPVALHAYFLKEGIIQEQDRILIIDGGF
RTLEMTDMKQNVILNHYETELGCSKPLKNIKNILQNHAGESNQLHINDMPNILEKGYGG
REENPQTSQVHTLIQKELDAHFQDVMRVLQEQFKLEQYDTIIWTGGIVDLHKKRIEKIQG
EISSFRMVDASKEAALHGYYMIGSQVFDDITNQSVYESKL
gi|124262661|ref|YP_001023131.1|hypothetical protein Mpe_B0117
[Methylibium petroleiphilum PM1]
(SEQ ID NO: 158)
MLTKTIIGLDVGRSAVKVVAFANGLYYRLTFPSLVSPAFPINDEGTAARAELETVEVLGK
RYFTGDTARLQGGVNMSVGLSHDWTNGPEYLALVASTMKRLAALGVPGLDSPYIVLGT
PASLFGRQKEALAQRTQAVVAAEMKVLPQPMGAYCNFFMDARGVPIKDRQKRPDGKN
RSWAVVEVGHYTTDFLLMREGNYIERAAVSCEGVHFAAENLVRILAAKDIQATPLTAEE
ALRTGVIVDFGERRIEAQVAEAVDHVVQKIMTMADSVLSNDVRSLDGVLLAGGGAPIL
AAGLQKKWPHTVLLENPRMAVADGFCRYGVGQMLRRAMAAEKATA
gi|57505927|ref|ZP_00371851.1|hypothetical protein CUPA0063
[Campylobacter upsaliensis RM3195]
(SEQ ID NO: 159)
MANEIQKIAIDIGYGDTKVAVGKEVFKFASAISKQKEAQSEYFEGKNEGVYDFLGKKYF
VGDNALFEAVSTRGFDFLVKYSPLLVYHAIKKANFDLSKDIHIFTGLSIVNWGEKERFLE
SLKSIKVDNDILSPKITLMAQGQGVFCDYEKEKEGLVCVVDIGYNTFDFLVFDNGNPRQ
DLSFATKKGANVIITELQNIIKKRYSLDISEQSSKDIFQNGFIEIYGEKIDLSDSIDDLKEEYS
EFIINELRNQREDIVKTAKRVIFSGGGAYFLDNVKSLKNVKNVDFSDKPYEYANVKGYL
KWKK
gi|134287584|ref|YP_001109750.1|hypothetical protein Bcep1808_7086
[Burkholderia vietnamiensis G4]
(SEQ ID NO: 160)
MFPSLAPLAASRSIAGYGESVLTARKVATIVIDQVEYEVGPDVSLTAAYGNTGRALADD
YVLSANYAALLFGAIHFAGVDHIERLVLGLPVHNMKKYAAELKERFTGELDFGAGRVKI
DKVMVIPQPLGSLVLASSNRPGGFGRDVEHLVVDVGYFTTDWVYANGFTMDDKRSGG
MPGGASQIYQRIAALIARDQGDEVEDIERIDKALREKTPFFFYGTNVDLAPYLEMAQPLI
SGVVKEMQNNVGRLANVRSIILSGGGAALYAAVIRRAFPRVVIEVIDAPCLANVRGFLL
VGESSLARERR
gi|75764516|ref|ZP_00743991.1|hypothetical protein RBTH_08102 [Bacillus
thuringiensis serovar israelensis ATCC 35646]
(SEQ ID NO: 161)
MKSLYAIDVGIGFTKRAYRQDVDSEMTIKSEASTLAPVPNHTDSEDLTKVSFIDLDFAYY
MGNEAHQSDASLLPPFNEEIENYYESERFKQQIFGCIAKDYKENVVLPLVVTGLPVTCFG
SQHEQLQHALKKETSVQIDGKFINITVENALILQQPVALHAYFLKEGIIQEQDRILIIDGGF
RTLEMADMKQNLILNHYETELGCSKPLKNIKNILQNHAGESNQLHINDMPKILEKGYGD
RDENYETSQVDILIQKELDAHFQDVMRVLQEQFKLDQYDTIIWTGGIVDIHKKRIEKMQ
GEIASFRMVDASKEAALHGYYIIGSQVFEDITNQSAQKSQL
gi|75758323|ref|ZP_00738447.1|Hypothetical membrane spanning protein
[Bacillus thuringiensis serovar israelensis ATCC 35646]
(SEQ ID NO: 162)
MKITMMNKDSGNSLDMNLIDGFYIETPTNVVEISKDEADSHFVATITNPKELLSRLLISTT
IPGEDTERFFLVGDEAGKHALANNHVNKLHDKITSPIPYVMFLSAVSFYHAINETRESDD
NTVEIEYFQTMLPIWLLKRTAKFSEAQNAMAERFAGEHEVTIHTPGMEKTLKITVEKAT
CRIEGEIARLAIKKNFELEDREEARQFDNNDTVLVDIGGGTIDLVLSPAGLKSPKNRDSM
QPIDKLSYLSHIEKLRKEKFLEKFSDLRSFETFIVNNFQKPKMELVDGNTGQRVDLTDKIR
SSLKEFAKFLILKIQDVMPAPADKVYKYVYFGGVAPILETSIHEVIEEMYGAEIAQANHIF
LPDSRKLNLYGLEVKSRGEMLQKTEK
gi|75759083|ref|ZP_00739189.1|Hypothetical protein RBTH_07086 [Bacillus
thuringiensis serovar israelensis ATCC 35646]
(SEQ ID NO: 163)
MAYTGVLLSKTRRQPRPNKIFMQKAKVMVLDIGAGTTDLIVIDQGKAIERSKYTIDLGG
NNITQTLRTTVQTNLEIRLSAQVFEQGVITGKVKQGLKEHDVTDELIGAKRSVAAKISKE
VKDYLESSGIEANSIEYILVVGGGSIPSENDKVKPISDYLLDSIKRFAPQVGLVDISDIITKP
NSVAFENVADADFVSSRELNISGAGTVTDLLEIKQYLAQQEQAKQVQA
gi|167036509|ref|YP_001664087.1|hypothetical protein Teth39_0078
[Thermoanaerobacter pseudethanolicus ATCC 33223]
(SEQ ID NO: 164)
MFKVGLDLGYGYVKGINEKGKEVLFPSLVGNAYERVLSGLFGTDNNKADNMHVVIVN
ENKEEYFVGELARREGKNVSYAFDEDKIYHPNTRALLTASCLLLLPEEEVPVHIVTGLPL
EQYIHKKEEFKNMLKNFKVMAYFKGDEKVKTIKFEKVTIFPQAAGAVYHAVMADIQKY
LVKGSYIGLIDIGFKTTDYIVFMVEDKLILREDMSGTVEVGMSALNNTVDKIFTQRTGSKI
DVSELIRLISDGKIFYKGRELDFTKEIDAVRSEIARVMKDKIKLIWGSKLDFFNTVFLAGG
GAKELVEYMKDFYEKIVLVKNAQFANARGFLKVAELEEKKAVNVR
gi|167036475|ref|YP_001664053.1|StbA family protein [Thermoanaerobacter
pseudethanolicus ATCC 33223]
(SEQ ID NO: 165)
MFKIGLDLGYGYTKGINETGRMVLFPSLVGNAYQRNLIGLFGQNLNNLIENMHVVLRN
GKEEQEEYFIGDLARREGRNVSYAFDENKINHPNTKAVLASASALLFPSNDEPVHIVSGL
PLEQYIHQKDELRDMLKNFKAIVEFKGYNILKIVKFDRVTVFPQAAGAVYYAIMDDLQK
YLIKGSYIGLIDIGYRTTDYIVFVVDGKLSLREDLSGTLDIGMSQLNNAADKLFTQKTGS
KLDIPELIQLVNEGSIFYRGKVLNFEKELNEVKLEISRVIQDRIKAVWGSKLDFFNTIFLAG
GGAVSLFDSLKNLYENTVLVKNSQFANAKGFLKVAELEEKKERDRE
gi|120536986|ref|YP_957044.1|StbA family protein [Marinobacter
aquaeolei VT8]
(SEQ ID NO: 166)
MKTKRRAIDNGYNHHKVAWVEDGKIKTIKYPAILGSSTEAMTELGGGYANMYESTSGE
RFVVDEHVSNRISLRTGDYGLTEGNRVLVNHGLRETGIKPDDEVMLVTSLPVRDFFSSD
GSRNEDLIAGQKESMMKPVKVVLNNTDDPVRVANIVRSDVVSEAVAAAFDFLVDNVG
ESAKPLHAPLAVLDFGGSTFDVVTLTKDLRIRHASSGTLKRGTMDIIEPLKRLLLKHAQE
MKIKVSEIPDWMINQVMATGKMPYFSYEDGKPKNTEMPVNDVIEAAAAETVSEIKAFV
KQKIANFSEYQAVLLVGGGSLLCRKLFRDWEELPQFIVMDEFANARGMLKLVSI
gi|146296416|ref|YP_001180187.1|hypothetical protein Csac_1394
[Caldicellulosiruptor saccharolyticus DSM 8903]
(SEQ ID NO: 167)
MKCGIDVGFGFTKAASEKGKKVVFPSAVAKTFMTDVGLKPTSDYFVTYMNQTYAVGR
AATQCLITETSFSEERFSTDFSKLLVLTALMALECDREVELGLGLPLMLYPKLKEKVKDY
FEFSEEIIINSNGIAHSYHITRCEVFPQGVGALFSISSPVEDGIYCILDVGFRTTDVIVVEIRN
RNINPLLDMCFTVDKGMSLAIERLGLMIERKYGVSYDTSLLFDIHERSHISVRGRKIDIEA
HKKEVFTAIADDIVQSISRRLQRGFDTFDAVLVAGGGAFNVASVLQKEFENVYVLDDSQ
FANAKGYLTLLNLGV
gi|146297649|ref|YP_001181420.1|hypothetical protein Csac_2658
[Caldicellulosiruptor saccharolyticus DSM 8903]
(SEQ ID NO: 168)
MLVLTALMALESDREVELGLGLPLMLYPKLKEKVKDYFEFLEEIIIDKNGVAHSYHIARC
EVFPQGVGALFSITSPVEDGIYCILDVGFRTTDVIVVEIKSKNINPLLDMCFTVDKGMSLA
VERLGLMIERKYGVSYDTSLLFDIHERTYISVRGRKIDIEPHKKEVFRAIADDIVQSISRRL
QRGFDTFDAVLASGGGAFTVASVLQKEFSNVQIVENSQFANAKGYLALLSLGL
gi|120597909|ref|YP_962483.1|hypothetical protein Sputw3181_1079
[Shewanella sp. W3-18-1]
(SEQ ID NO: 169)
MFVLGVDIGYSNLKLAIGQSGSEPKTIILPAGAGPADRMPERIGGGDDETCLYVSVDNER
WAAGVPAGRLQGWERELHPEYPTTKTYKALFHAALLMAETESIDLVVTGLPVSQFHEP
QRKSDLVQRLKGVHQVTPKRSITVHDVKVLPQPAGAYMDLVQTGGDLGLIEEGRVVVI
DPGFFSVDWVALEAGEIRYSSSGTSLQAMSVLLETIDKLISEDHGAKVGMDRLEKAMRT
GDLQVLLFGEKVDISPYLNAATKKVAPIALTAMRQSMRDESINADLVLIAGGGALAYKE
AAKEIFSRSKIIVPEQSVLANVRGFWFYGA
gi|150019823|ref|YP_001312077.1|StbA family protein [Clostridium
beijerinckii NCIMB 8052]
(SEQ ID NO: 170)
MRISADIGYNTTNFIGHNIEGSFSSTVKEKMHELETAKYTVEYNNKTYLIGNDDGFTSIEH
SRDKDIIFHICLYTAIAATMSSTIDNNVRVITGLPAQFFAEQKNSLIKALENRRVFMKLNG
ENRSFTITKVIVFPQSAGLFLYDKSLVEKDTLVVDIGGGTLDIAYMSNGQFKEGRTYPLG
VNPTYDVLLQELTKYGVNYSNRMKAEQIIADKAIFVEGKEIDVSKDIDNVLSLRAGEIIN
AIKQAFPEQSKYSRFVFIGGGALLLKNYLKDYRVLDDAQMINVKTYDIIGKSKNV
gi|121582927|ref|YP_973369.1|hypothetical protein Pnap_4345
[Polaromonas naphthalenivorans CJ2]
(SEQ ID NO: 171)
MKPSILAIDIGFGNTKATWSHRTLAGKAEAWSEIIFKSVCPLALDDDIAPGQATSNLDRV
AVSVAGQAYYVGPKADREGGLRALHPDYINTPTHEALLLGAWHYMFKETGIVSPSVDM
LVLGLPVSGFSANKKVLKEIGSRVRRVPVPMPMRSRLGKAYVDVSAKQVVVLPQPLGG
LRLAAQSALELADDGVISMVIDPGYLTFDWLLSDGMAPHYELCGSFQGGVSQLINAVA
KRLSQDHGIESADFAMIESALAKGELLLDLKRIDMTPYRKLAGQQAQDMVAQWLMRF
NPYKAGVSRIFVCGGGAGFYIDALKARLPHIRMDVMPEGVMSNCRGYFLTGQDMFAD
gi|88706892|ref|ZP_01104591.1|bacterial StbA plasmid stability protein
[Congregibacter litoralis KT71]
(SEQ ID NO: 172)
MTERIDKKPTQADKTSQLTSDPMSVVQVGLDDGYAYTKVALADGRLFSAPSRARIGSA
GVTWIREQEQRIFEYETGGTVYSVGAVDGEATQFDEYPSSALNRVIVQHAFQQAGLSGR
SIHLVTGLPVSAYYRHDGQLRQQEIDRKCESLKLSVEPKPNSAKPGKSILSASVAFHEVIP
EALAAWYDHVIVTQADGVTLDGDRLSAPIAIVDIGGRTTDFVVVQDQGIVHGSSGSLNR
GMLNVKSRVADLIQQTFDMSELGEQSIARAVDSSRLRLHGKDHDISAMVAAAKRELVE
LLYAETRRKLGLGVELDQVLFVGGGSAALATDIANWFPNQTIPDHAAFANARGMLKYL
QYVCDDTAGGF
gi|88707200|ref|ZP_01104890.1|bacterial StbA plasmid stability protein
[Congregibacter litoralis KT71]
(SEQ ID NO: 173)
MDALAVGLDDGYAVTKVALATGQLFAVPSRGRIGSAKITAVNQNDTGIAEYMSGDEHI
AVGVDDFDATGFDDYPLSAVNRAIVQHALLAAGLSGRSIHAVSGLPVARFYHSDGQRR
DALIASKTKSLLAPVQPLDGRPPVSIACHDVIPEALAAWYDHVIIEDGTEWVRLDESAVE
APLAIVDIGGRTTDFVVVADEKLWHQSSGSITCGLLDLRGSVAEAICAVHDLDSLSDAG
VDQALTENTIRLFGKDHDVTAIVSKARQQIVLRIEQETRRRLGRGAELERVLFVGGGSVV
LADAIRHWFPNQAIAPHPAFANARGMLKYLRYVGLPSE
gi|134298835|ref|YP_001112331.1|hypothetical protein Dred_0971
[Desulfotomaculum reducens MI-1]
(SEQ ID NO: 174)
MSKVVAIDFGYREIKGVNSEGLEIKFPTAMAPYVKHPTAEGLEEVVTVTKPGYEPEMYF
YGQKALDETGVGFTNDRDKHLHSGHDILMLAAARKLGYENGDTLVVGVPISYADQRE
ALKTQLERLHGDVSVDGGKPKRISFNDVLVLRQGIVVFGLIPDLPNGTLISFDIGEHTTDV
STVKFKNGVIEPNPSKCFSLEYGYSKVVEAIQKEFQSKAGSPVSGEQARAIAEEGYVIYK
LKKLDMTLEVLRAKEEIAKNIVKDAKKRLGEIADFAAGFYLCGGGADVLPLKELLPGAV
IVDNPQTANARAYLQLAMSE
gi|121998776|ref|YP_001003563.1|hypothetical protein Hhal_1997
[Halorhodospira halophila SL1]
(SEQ ID NO: 175)
MERCIGLDMGYGFIKIDDGREGHVFPSVVGEGESGMPMSLGVAQRSGSSELRITYGGKS
YLLGDYAIRHSRLAHRGLSPTRAEGDDLKILFLGALSLYARETVNNFHVVTGLPPGRMH
MADDLVRQLRGDHEVIRHVGASRFGVSIRLEQIEVVPQPVGSFWAEVLDDRGQIRGDHP
LLNGRVGIMDIGFRTSDFATVIDGEYSPGFCKTVPLGISFGYEEIAQELSTQYGLEREQYT
LDEAIIQGQVNVNGRPVDIVELRDRIFGDIATKLLVEARSMWQIQEYDHIIITGGGGRVLE
RYLRPELSQAQLAQDSVTANARGYFNWAYFNAQQRAAEMGHATEQSSAEDYSSGSYG
TGSTTYSRGGDDGRDSAAVPQSRSGSEG
gi|89096483|ref|ZP_01169375.1|hypothetical protein B14911_12622
[Bacillus sp. NRRL B-14911]
(SEQ ID NO: 176)
MVDLKNPRIAAVDVGNDSLKALFGKLDYELNIPNVIARDVADRPVIGIEELDSKEPLDGI
HVKVHSPALKDNNAIYRVGTLATKSDNASELDPGSSKSEEDQTLVMLFVSLALDAVREE
NAGLFPKNNNIIDTNYILGTGLPLREVKEGKDAGYRSKLLGSVHQVEFLVTPKYQGIKV
NLKFSDVKVYPEGFAAFINLVMDNDLNIINKELIDKRILIQDIGGLSTDIAVIKNRTVDDD
KAQGFNLGVSESLEMIREEIRSKHGVELDSRRDVVEIITKKNDRNHIMVKGSRTSVHDIT
DRILFDLAKKQYRLLRNVWQKNSQTEICYFVGGGSAVLKEYIKSLNNSLDGYNIDFFED
EKESIWMMANAYYKLVADHLKRTSKPDKQDEKKPVKA
gi|118602027|ref|YP_908727.1|hypothetical protein P91278ORF_129
[Photobacterium damselae subsp. piscicida]
(SEQ ID NO: 177)
MSQFVLGLDIGYSNLKMAMGYKGEEARTVVMPVGAGPLELMPQQLTGGAGTCIQVVI
DGEKWVAGVEPDRLQGWERELHGDYPSTNPYKALFYAALLMSEQKEIDVLVTGLPVSQ
YMDVERREALKSRLEGEHQITPKRSVAVKSVVVVPQPAGAYMDVVSSTKDEDLLEIIQG
GKTVVIDPGFFSVDWVALEEGEVRYHSSGTSLKAMSVLLQETDRLIQEDHGGAPGIEKIE
KAIRAGKAEIFLYGEKVSIKDYFKKASTKVAQNALIPMRKSMREDGMDADVVLLAGGG
AEAYQDAAKELFPKSRIVLPNESVASNARGFWFCG
gi|163937904|ref|YP_001642790.1|hypothetical protein BcerKBAB4_5321
[Bacillus weihenstephanensis KBAB4]
(SEQ ID NO: 178)
MTVDYIGVESANSFVKVASANEELCYLNTLRRVESFEDTTGLTVYTYEGIRYVIGEAQGI
SSSARNDDRYSSAGYRTETILAISQLVKDGSEIVVGTGLPSEDYKNGDNHEKVKRNLVG
EHTVQIDGKTKTFSILRVYTPMQPIGSVVNRIYDYNLKVRKDMESERTARKLVIDIGFGT
TDVCEAEGLRIVRYDGVQVGMLEANRIIKDELSKRGARGIVSLLHMDTLLRNAKREYV
KDEFTDKEILSKVIIEIGGKEYEIKDLMEQALEYTARIVMQRVDNLGYVLKDYDVVLFTG
GSLLALHKYIKPYLTGVNTKAEQGAQTANVKGYTKYAMIQDAKAVAK
gi|163940835|ref|YP_001645719.1|hypothetical protein BcerKBAB4_2902
[Bacillus weihenstephanensis KBAB4]
(SEQ ID NO: 179)
MKSLYAIDAGIGFTKRAYRQDVDSEMTIKSEASTLAPVPNHAESEDLTKVSFIDLDFAYY
MGNEAHQSDASFLPPFDEEIENYYESERFKQQIFGCIAKDYKENVVLPLVVTGLPVTCFG
SQHEQLQNVLKKETSVQIDGKFINITVENALILQQPVALHAYFLKEGIIQERDRILIIDGGF
RTLEMTDMKQNVILNHYETELGCSKPLKNIKNILQNHAGESNHLHINDIPKILEKGYGGR
EKNYQTSQVNTLIQKELDAHFQDVMRVLQEQFKLDQYDTIIWTGGIVDIHKKRIEKMQG
EISSFRMVDASKEAALHGYYIIGSQVFEDITNQSAYESKL
gi|17232583|ref|NP_489131.1|hypothetical protein all5091 [Nostoc sp.
PCC 7120]
(SEQ ID NO: 180)
MFVPANVKQMSIEQVRGGVFEARATDPLMDLWLEYQGKGYAVGQLAADFGANLGVG
QSKVEDALIKVLASAGYFKLKDEISVVLGLPFLSLEQFEREKAQLTSQVTGPHVLNFRGE
SVSLNITKVWVMPEGYGSLLWSEAQPKKGGASPDFTKISTAIVDIGHQTIDLLMVDNFRF
ARGASKSEDFGMNKFYELVAAEIDGADSQSLALISAVNKPKGERFYRPKGASKPTNLDD
SLPNLIEQFSREICSRVLAWLPERVTDVIITGGGGEFFWEDVQRLLKDAQISAHLAAPSRQ
ANALGQYIYGEAQLSSNRAARA
gi|17227425|ref|NP_478476.1|hypothetical protein alr8051 [Nostoc sp.
PCC 7120]
(SEQ ID NO: 181)
MINIYCADIGNYSSITALKGEKPRVMRSVIQDVTYTSARDYDSDNSPSVKLDDKVLVLG
DRATKQKNSQTAAERGKDLPEFFKPFTLAGLRQDFDGIVRFLVPEHSQWHEDTIRRTLV
ADHQITVNGTNYRHRIKNVEFFLETDVAVVNAYRNGKLDMDGDTLAIDIGGGTTNYVV
ITPSLDVLTRRSIPKVGGVSLANDIINSDLMQSFAKRDNVAFKVAKMMDAIADASFIYGR
KYDFSSVFPGLLENWFNNLMDSISTAANDYLADITNVMLIGGCANLVRQKLSSKQGFYI
PANPQLSNIQALLAM
gi|17227470|ref|NP_478652.1|hypothetical protein alr9005 [Nostoc sp.
PCC 7120]
(SEQ ID NO: 182)
MTDLAEMPENALPRHQGTLTLIAGYDLGNSGVKFVTSDRKIRFPSYLENCYYRPTELPTE
GYVEYLEGDAITKLDYKQWLSGYAAYDANPKNHLRVTDDATAKVTQSLKHLLAALSN
YPYKPVINLIICASLHERGDLEEQLIDAIAGKHIVKFGGKPIPTTVNIHVLKVYDEGHAAIA
ANAHTLDTSKQNVIVDIGNRTVIATLIGQKGHLANRKTFDNGVEELIRMISVNPTFKNRL
YGEIAIPHLIRQGLESSEKPFWYGKQFSFEDVYRQELMPWVQKSLAPVFKFIHPWKINAD
ACLIIGGGSQLPSVDEALKAKGFVIAENPLWANAEGLYQLATMMYSRGIDE
gi|23100549|ref|NP_694016.1|hypothetical protein OB3094 [Oceanobacillus
iheyensis HTE831]
(SEQ ID NO: 183)
MTKSRIAAVDVGNDALKGNYGKLENELYIPNVIAPDLEERPVIGIEELDDKEILENIHIRIH
SPALSENNLIYRVGSLATKTTNSQELDQGSSKSEEDQTLIMLLTSLALDAVSASDFEEKN
GVIDANYTLGTGLPLREVKEGKDVAYRSHLLSSVHQIEFLVTPKYQGKKVNIKFDEVKV
YPEGFAAYVNLIMDNDLKVINKDIIDKQILIQDIGGLSTDIAVIRNRNVDDDKAQGFNLG
VSESLEQIREEIRTKHGVELDSRRDVVDIITRKNDRNHIMVKGSRTNVHDITDHILLELAK
KEYRYLRNVWAKNSQSEICYFVGGGSAVLKDYIKALNNKLDGYNIEFFEDENESIWMM
ANAYYKLITDFVQKSSPQVVEKEKKTTKSK
gi|21233912|ref|NP_640210.1|rod shape determination protein [Proteus
vulgaris]
(SEQ ID NO: 184)
MELLRKGRSFGGLFLIKGKVMNQSERFIVGLDIGYSNVKVACGGTQLLDPKVTIFPAYA
TPEPESDLALAKKSPDEVKVYPNGTEWRVFTNRVGHRELHESYHSTEMYKALFYGALI
KATEGRSDVIDILVTGLPVRIANSEADRSQLCESFTGKHEVTPGRFILVKEVVVLSQGVGI
MNDILNTEGLISDEDLEFSNILVIDPGYYSMDYVTFHRGDKKNEFSGSSLNATSVIIEEIVR
VLERDYPKEGAQETERIETALRLGNKTFNNGFRSVEIEPLIEEVSHRIVSSVVAELLKRTR
SIGPVHIIISAGGGARFYDHFIKEAFPQARILQSVNPVASNSIGYWHYGVNKLSSQSD
gi|27228647|ref|NP_758697.1|hypothetical protein pCAR1_p156
[Pseudomonas resinovorans]
(SEQ ID NO: 185)
MQLQRLGFCRCGVSCVAGSSASSFGALLLSFFAGSGIRMGNALGLDIGYSNVIGVFGSG
DGQPESIIRPSQAAPLSVLPGDSGLRPGEVIVEVDGAPWVAFAAPGRVQDGRELHEDYTS
SHAYEALFKGALLHAAGDKDVIDCLVTGLPVSQARDKPYVEALIKRMTGTHRITPKREV
TVKRVEVVAQPIGTLTEIYCNSDASEVIEESVSIIIDPGFFSVDWVVFDHRELVVNSSSSSL
KAMSVVLEACNEEIAKDHGGIPGVEKIEHALQSGKSYILIYGRKVELAEYLERAAERVIP
SVFTEIKQGLRFLKGRAIDCVILGGGGASLYEPFARKEFPDALVVKPVNSVKSNAEGFW
HIARS
gi|32469309|dbj|BAC79052.1|hypothetical protein [Vibrio cholerae]
(SEQ ID NO: 186)
MFVLGVDIGYSNLKLAIGQSGSEPKTIILPAGAGPADRMPERIGGGDDETCLYVSVDNER
WAAGVPAGRLQGWERELHPEYPTTKTYKALFHAALLMAETESIDLVVTGLPVSQFHEP
QRKSDLVQRLKGVHQVTPKRSITVHDVKVLPQPAGAYMDLVQTGGDLGLIEEGRVVVI
DPGFFSVDWVALEAGEIRYSSSGTSLQAMSVLLETIDKLISEDHGAKVGMDRLEKAMRT
GDLQVLLFGEKVDISPYLNAAMKKVAPVALTAMRQSMRDESINADLVLIAGGGAMAY
KEAAKEIFSRSKIIVPEQSVLANVRGFWFYGA
gi|51894421|ref|YP_077112.1|hypothetical protein STH3287
[Symbiobacterium thermophilum IAM 14863]
(SEQ ID NO: 187)
MERLIGVDLGYGFVKATDGREGYLFPSVVGDGSPYLPLRLASQETDPTDNLRVQIGDRV
YHVGTLAVRQSRMAYGFLSVMRDEGNDLLVLFLTALSLFASEANTTFSVVTGLPPGRM
HLADQFVRSVRGDHRVVRYRTGNPEELYLRVDRVTVVPQPLGTYWSQVLDARGQLAQ
QHPAADARVGIVDIGFRTTDLVTVEGGEYVPEQSRTVPTGLSAAYGAVANALLREYGIE
RENHALDEAIISGEIGVSGRRVDITGLREKAFEQLATKVLVEIRSTWQVADYDFLWFTGG
GGLALQRYLVPQFSQASLIADPLTANSREYLAWAHYIYGTGGAPWLERTPVNPQPRQG
gi|58616178|ref|YP_195307.1|hypothetical protein p1B50 [Azoarcus sp.
EbN1]
(SEQ ID NO: 188)
MQRTIIGLDIGHSSVKVVASSSSGRHQFLFPSVAIPAFAISDEGEARIAATETVAVGQRKF
FVGETALVQSCGQPPALGLTNDWIETPEHSALIAGAAKKLERLGLDLRNCLVVTGLPSA
LHTHQKARMREVVRQQIQAEVLVAPQPFGPLQTLMLTPAGTLSSAHDMCEENWAVVEI
GHFTTDFLLIQSGRIVEKASGSCGGVRLAVEHMQRLLNQENIQVDHFEAEQALRERRIKY
FGKALDVTEYAKQAISLIASEVMDTASRVLDPVARKLDGILIAGGGAPVIFPELSLKWPH
ATIANEPRMAIAEGFCRFGMSISAKTQGAKEPAAA
gi|182625447|ref|ZP_02953219.1|putative ATPase [Clostridium perfringens
D str. JGS1721]
(SEQ ID NO: 189)
MLKLGIDLGNGYTKFKGSKFASKTKVGRLASLAGLGEKPKDIHEVGYKGTTYIVGDGE
VFTSPDRYFGLDYEICLLTAIGLSSKDIVIDANICVGLPIIYFMSETKVLLEKKLNELTEKD
SIKITINGQDKIIKINNARVFAEGAYVLDCMDTDNIITIDLGAGTVNITQWDNLIPISYDTIT
KSFNKLYRDIANHIKNTGRGVVTPAYIEANFGEDTITIDGKVVDITDTKQMISKYVSAIVS
NVYDICDVPQANKIQIFGGGAIATEEYWKDAFGKDRDGVSVLPNSQYTNSKIYQKAAEI
LK
gi|89894855|ref|YP_518342.1|hypothetical protein DSY2109
[Desulfitobacterium hafniense Y51]
(SEQ ID NO: 190)
MFENDILVAGGDPGFGAIKLDAGDTKVLFPAVICKGNERIFSALGNGNVSRGTDEEMQT
GSLDVIVTNHSTGVSRHYFMGSLAESLNPNEAHYCWDEDKSTDEEATALLVVALAVAQ
KEPKANIYLGTGVPVKYYAALKDKYEAELKGTWSVAFRSGPFKGQTRQLTIIRSRVLPQ
SYGVFIKETLNEYGIPISPKLFNGYVVVIDPGFRTTDVATFYDGVMLDPPNSFSIEKGLKW
AYTGVAEQLKEMTINHANPIETDDKELDKVFRVNEGMYPWNNGAINLNPVMQDMLGQ
LGTDISREVKKSLKPMLGKIHTVLVAGKVGEMIFEHLQFENKVLIENPQFGNATGFRIMA
ANLVNNITKKANAAP
gi|15894444|ref|NP_347793.1|ATPase of HSP70 class [Clostridium
Aacetobutylicum TCC 824]
(SEQ ID NO: 191)
MITVVDLGNFNIKYKSGSNQGNFSSKITDYQPYPEGFERIQMQGESKITYLGVGELNKEF
NKVARNYLPQLLYAICRANNYDNIETNLVTLLPIVQMKNKEKMIENLKEKEFNFQFNGE
KRKVLINDTIVLPEGYATYFSLSEEDKESSLCIIDLGSRTINICVLQDGAIQLLHTIKLGSFD
FYTKVKTRENSKGEDYTEEDIPRLVENGTIEISDIEYEDFLTEVLNEVKAYVNLKTYKVI
WTGGTALMLKEQIEKLPLNNSKLHNDPLNSNTNGAAGAAEIIWQSEEE
gi|15004829|ref|NP_149289.1|hypothetical protein CA_P0126 [Clostridium
acetobutylicum ATCC 824]
(SEQ ID NO: 192)
MNIKRFNADFGNSTGNFLIDGYYFEIPTNIVEISSKKAEGMFVSPITEKNELLDRLMISTGE
KENEKFYLVGEFAQGHEIKTHVNQMNDKLTSIIPYANFLGAVAYYAILKNPSEEKEINVE
IDNMKMMLPIWILKKASKFSVAQNQMAARFLGEHTVKVLTMGMERIIKIKVNNSVCKIE
SEVARYAIKYKMVQEDKIIKILPRANLSDKFTKCETVLCDFGGGSIDCVKLGEGLTPPKA
RDSFKVIDIEPFLGWLETFRKEKVLQYFYSIKQIEKFLINNYKKQKYILEDPNTGKSYDFT
SKFTEMLQDYSDKLVPVIFNTFKETDRLLKFVYFGGESPVLKPYIKKTLLKFVTEKVAEE
NHIFLDDLLENDTSEVFKPTSRTINLTALELLSISEVTKNKSSEKNE
gi|20808451|ref|NP_623622.1|hypothetical protein TTE2052
[Thermoanaerobacter tengcongensis MB4]
(SEQ ID NO: 193)
MNIGLDLGFGYVKGVNSQNKRIIFPSIVSIGFDRPLAGIFNTNDIIENLHVKIVDKDGENSY
YVGNLARREGFSNSFALDIDKYTEPEAKALLSTAIFLLTMNENEPINLVTGLPLKQFQAY
KKAFEEELKNYKALVSLPEYRLMKTVEFEKVTVFPQAAGAVYYALLEDLDKYLLSDSYI
VLIDIGFKTTDYIVFFVEDRPYFLADLSGTIDAGISKIFTAMEQIYTAKTGSNLDTGDFITIL
NKGSIYFKGKYIDFTEEITALKKELAKLIEKRIYTSLKGILDKVMVIFVAGGGGADLYPYL
KDVHTSVELVKDAQFANALGFLKVAEIQK
gi|30021240|ref|NP_832871.1|hypothetical protein BC3130 [Bacillus
cereus ATCC 14579]
(SEQ ID NO: 194)
MKSLYAIDVGIGFTKRAYRQDVDSEMTIKSEASTLAPVPNHAESEDLTKVSFIDLDFAYY
MGNEAHQSDASFLPPFDEEIENYYESERFKQQIFGCIAKDYKENVVLPLVVTGLPVTCFG
SQHEQLQRALKKETSVQIDGKFIHITVENALILQQPVALHAYFLKEGIIQERDRILIIDGGF
RTVEMTDMKQNVILNHYEAELGCSKPLKNIKNIVQNHEGESNQLHINDMPNILEKGYEC
REENHETSQVHTLIQKELDAHFQDVMRVLQEQFKLEQYNTIIWTGGIVDLHKKRIEKMQ
SEISSFRMVDASKEAALHGYYIIGSQVFEDITNQSAYESKL
gi|30263107|ref|NP_845484.1|hypothetical protein BA_3174 [Bacillus
anthracis str. Ames]
(SEQ ID NO: 195)
MKSLYAIDVGIGFTKRVYRQDEDSEVTVKSEASTLAPVPNHDESEDLTKVSFIDLDFAYY
MGNEAHQSDASFLPPFEEEIENYYESEQFKQQIFGCIAKDYKENVVLPLVVTGLPVTYFG
SQHEQLQRALKKETSVQIDGKFIHITVENALILQQPVALHAYFLKEGIIQERDRILIIDGGF
RTLEMTDMKQNVILNHYETELGCSKPLKNIKNIVQNHAGESDHLHINDMPNILEKGYGG
REEDPQTNQVHILIQKELDAHFQDVMRVLQEQFKLDQYDTIIWTGGIVDLHKKRIEKMQ
GEISSFRMVDASKEAALHGYYMIGSQVFDDITNQSVYESKL
gi|42782222|ref|NP_979469.1|hypothetical protein BCE_3167 [Bacillus
cereus ATCC10987]
(SEQ ID NO: 196)
MKSLYAIDVGIGFTKRAYRQDVDSEVTIKSEASTLAPVPNHAESEDLTKVSFIDLDFAYY
MGNEAHQSDASFLPPFDEEIENYYESEQFKQQIFGCIAKDYKENVVLPLVVTGLPVTYFG
SQHEQLQRALKKETSVQIDGKFINITVENALILQQPVALHAYFLKEGIIQERDRILIIDGGF
RTLEMTDMKQNVILNHYETELGCSKPLKNIKNIVQNHAGESDHLHINDMPNILEKGYGD
REENPQTSQVHTLIQKELDTHFQDVIRVLQEQFKLDQYDTIIWTGGIVDLHKKRIEKMQD
EISSFRIVDASKEAALHGYYMIGSQVFDDITNQSAYESKL
gi|83589213|ref|YP_429222.1|hypothetical protein Moth_0345 [Moorella
thermoacetica ATCC 39073]
(SEQ ID NO: 197)
MLAIQTNPQPAALAIDVGFGYTKAVSSTGGKVIFPSVVAPAGSPDAFDRLDKSDTGYRV
RIKKGIDGLLEEWLVGELALKEGREVQYFQDWEKHSHPAHDAVLLAAAVLTWNWPRA
GSGIMGISNPALVVGLPVDVWRDELQREGLKKHLAGLAAEVSVNGNDPVRVTFSRVYV
YPQAAGAFLTVPDLPDSGIVALVDVGQKTTDSAAIEIVNGRQRLVKTMCFSINKGMAAL
VEAVREEFRRQTGAPLPPQQAWETVKSGSLWYRGKQIDMAPAIKKARSEIARAIADQVL
AGWGERADFVRKVYLAGGGILDLPDLKNMFPAAAVLPGPQWANALGFLKVARGLAV
gi|52142376|ref|YP_084454.1|hypothetical protein BCZK2867 [Bacillus
cereus E33L]
(SEQ ID NO: 198)
MKSLYAIDVGIGFTKRAYRQDEDSEVTVKSEASTLAPVPNHDESEDLTKVSFIDLDFAYY
MGNEAHQSDASFLPPFEEEIENYYESEQFKQQIFGCIAKDYKENVVLPLVVTGLPVTYFG
SQHEQLQRALKKETSVQIDGKFIHITVENALILQQPVALHAYFLKEGIIQERDRILIIDGGF
RTLEMTDMKQNVILNHYETELGCSKPLKNIKNIVQNHAGESSHLHINDMPNILEKGYGG
REEDPQTSQVDTLIQKELDAHFQDVMRVLQEQFKLDQYDTIIWTGGIVDLHKKRIEKMQ
GEISSFRMVDASKEAALHGYYMIGSQVFDDITNQSVYESKL
gi|75908582|ref|YP_322878.1|hypothetical protein Ava_2365 [Anabaena
variabilis ATCC 29413]
(SEQ ID NO: 199)
MTDQPSAATPMNAAAIPLNRVSASTPINAAPANNKPNNGSSKSILSVDLGRTSTKTCVSR
EPNNVVFVPANVKQMSIEQVRGGVFEARATDPLMDLWLEYQGKGYAVGQLAADFGA
NLGVGQSKVEDALIKVLASAGYFKLKDEISVVLGLPFLSLEQFEREKAQLTSQVTGPHVL
NFRGESVSLNITKVWVMPEGYGSLLWSEAQPKKGGASPDFTKISTAIVDIGHQTIDLLMV
DNFRFARGASKSEDFGMNKFYELVAAEIDGADSQSLALISAVNKPKGERFYRPKGASKP
TNLDDSLPNLIEQFSREICSRVLAWLPERVTDVIITGGGGEFFWEDVQRLLKDAQISAHLA
APSRQANALGQYIYGEAQLSSNRAARA
gi|270208508|ref|YP_003329281.1|hypothetical protein pCD01p15
[Lactobacillus paracasei subsp. paracasei]
(SEQ ID NO: 200)
MEIFSLDLGNKQTKLKSSKSEYVLPSRYLNQADMPMSVGSSTTNNDLHIYSVPFSDDKY
VWGRDIDGLHLDEYLADTIMYGNRYNSEAFKLLANFALGLLASDFKIANNQVLEVVVT
AGLPTGDYADQERLRSLLKVLEGQHQVTIDDQIVTVRVRKVYILPQPIGTLYNELLDDQ
GFIKNKALLDEKVGIVDVGGGTILIDTILNFELSGKNRQQFNTGVNDLYEAIASRIEGDVS
LYQLEKELRHGNQQHQWSYRFSKNRQDDITELVGKESDRFTRRLVANVTSTLKNLDSID
TLFFTGGGANLINQKILKTTFTNAAIVKDTEVANVNGFYKYGLSQQVQEKEGK
gi|71907839|ref|YP_285426.1|hypothetical protein Daro_2217
[Dechloromonas aromatica RCB]
(SEQ ID NO: 201)
MELIVRAVDVGSGNTKFVTAAAGTDIRCASFPSVAYPSSDDSPSWPASERKKTVCIPIGP
LFYEVGPDVSLAADTFRAKQLHDEYTETPEYMALLRGALSMMKVSHIDLLVVGLPVAL
FTVKKSALEKAMTGRHDIGNNKVVTVGKAMAVPQPQGALVHYASEHQKMVEIGNEQS
LIIDPGSRTFDWLVARGMRFVQKQSYSFNRGMSDVLRLLAAEITKDIGSPYRDYDAIDLA
LRTGKQPLIFQKPYDMKRLLPLAETVAEQAVSTMKEWIEAPHSLQNIILVGGGAFLFRKA
VKAAFPKHRIHEVKEPMFANVRGFQLAGQNYARSKMTATDRGQVQGASGELE
gi|71908146|ref|YP_285733.1|hypothetical protein Daro_2530
[Dechloromonas aromatica RCB]
(SEQ ID NO: 202)
MLAARKSIEEPHMDYIVRAVDVGFGNTKYVSNVVGSDIRCTNFPSVAYPSMREPSGQPG
YERRKTVAIPVNGLFYEVGPEVELAADTFRATQMHDRYTETPEYTALLRGALALMKQP
EIDLLVVGLPVAALTTKKTALEKAVTGTHDIGNGKNVVVRKALAIAQPQGALVDFVEQ
HGKTTTIEREQSLILDPGSRTFDWLVARGMRLVQNKSHSVNRGVFDILQAIAAEIGHDIG
TPYNDIEAIDLALRTGKNPVIYQKPYDISRAMPMAHSIAQQAVASMMRWIDASYSFQNII
LVGGGAYLFKKAVKEAFPKHRILEVKDPLHANVRGFQIAGMNHVDKLFSGTATATHGGA
gi|77164147|ref|YP_342672.1|hypothetical protein Noc_0623
[Nitrosococcus oceani ATCC 19707]
(SEQ ID NO: 203)
MTELTDEKTTDQRQASIADDPMQVVQVGLDDGYAYTKVALPDGRLVSVPSRARMGAA
GVTWIRDVEQRIFEYETAGTVYSVGAVDGEPTQFDEYPGSALNRVIVQHALQEAGLSGR
SLHLVTGLPVAAFYRGDGQQRRQAIQTKRDGLKLTVEPVVAKKSSTRQALKASIAFHEV
IPEALAAWYDFVIVTLDDGVTLDADRLNAPIAIVDIGGRTTDYVVVQDQGVVHGSSGSL
NRGMLDLKLRVANLIQERFDLHELGEQIISRAVDTNRLRLHGKDHDVSDMVMNAKREL
VERLYAETRRKLGLGVELDRILFVGGGSAALSSDIADWFPNQTIADHAAFANARGMLK
YLQFVCDDASKER
gi|83814376|ref|YP_444614.1|hypothetical protein SRU_0469 [Salinibacter
ruber DSM 13855]
(SEQ ID NO: 204)
MFKTKTLPSVFEASNAELVDVSDSLLTGLKIGHNGRSYVVGELALLEGNAPHKGINNAP
SDLDYRLLLQAALAVTKAGAEEPMYVTTGFPSSTYAAHRDTAEELVKGTHVIDLDGRT
FGKSPDTSIRVEVDQVEIIPEIEGFTFGVRQGEPRERDPFFAVGLGYGTMEAALSLPSGIV
QRTTASASGLQYATQLMSDRLQKEHYLDMVTEHQLDMAMRKGSIVIGRKKMDLTEMR
QDVLSTYYEDIVSPTLKRAFDDADFGRARKMYVGGGGALFDELVDAFTDEFGDVLSLE
VVPNPASFISQGYALHAADANGGHRARAVGLDIGNANTVINLLREESV
gi|85859495|ref|YP_461697.1|mreB-like ATPase involved in cell division
[Syntrophus aciditrophicus SB]
(SEQ ID NO: 205)
MQMNLGLDVGYGDVKAVYQREGILEMLKFPTAIAYAEREVGDLSAFAGGEEYEYRGR
KYFVGREALVGAFSTRSFEFMKRYSPLFVFKAVKKIHRRTGELVTDVAMGLPLSHYTEA
NLKELVPLLQRIEVGREVLELNARFYPQGLGVLADYRLSQAGDVNARTDRDMIILDIGF
NTVDVIVVERGRIVKGESDTLERHGVSKISLDLAREIKVRMQLDLSEQESKDVLRQGRIR
VYGAERDLAELVRESAEKYMDWLIQEVHSKWMARIQRAEKVIIAGGGAYYLQEHIPEE
YLPLVHVPDHPEYANARGFLKALDVESGK
gi|157502129|ref|YP_001485228.1|hypothetical protein pBMB67_042
[Bacillus thuringiensis]
(SEQ ID NO: 206)
MVEQMLSKNMLLGGFDTGNIKAKISFLNEKGNIESFAIPTVIAEAPPAKIDLKSAPSKKN
DYVNEKDEDIELLHVRIISNSLDGDARSRAWYVGAYAKDQEDRQEPTVDEMGKTEDKF
SQKNKKLHLIPLFTSMAVAAARIGKEEVSVPFSGGMPIEDYKLRGEEQILEMLYGEHTVE
FLDGTYEGKKIKITINDGTMNVEGVSSVLAILFDIVNGEIVEVEGMDAEIGESYAINDLGA
GTSDNAFFEDGELNKKLSTNTDLGTNKYIDEILKNIKERFMENEILKSFMTDEIESPFKTR
EDFIQRLVMPEVEKMIEDDTYKPTFSVKWGPVKENVTDIVMDGMLKYAEDQKASLMK
FWFKTNADKNIVVGGGVLFGYAGLRDLKEQDGFILPKNIQESAYFTSRSYLIANLLEQLN
KEGVEA
gi|49479525|ref|YP_037246.1|hypothetical protein BT9727_2923 [Bacillus
thuringiensis serovar konkukian str. 97-27]
(SEQ ID NO: 207)
MKSLYAIDVGIGFTKRAYRQDEDSEVTVKSEASTLAPVPNHDESEDLTKVSFIDLDFAYY
MGNEAHQSDASFLPPFEEEIENYYESEQFKQQIFGCIAKDYKENVVLPLVVTGLPVTYFG
SQHEQLQRALKKETSVQIDGKFIHITVENALILQQPVALHAYFLKEGIIQERDRILIIDGGF
RTVEMTDMKQNVILNHYETELGCSKPLKNIKNILQNHAGESNQLHINDMPNILEKGYGG
REENPQASQVDTLIQKELDTHFQDVMCVLQEQFKLDQYDTIIWTGGIVDLHKKRIEKMQ
GEISSFRMVDASKEAALHGYYMIGSQVFDDITNQSVYESKL
gi|89885972|ref|YP_516170.1|hypothetical protein Rfer_4487 [Rhodoferax
ferrireducens T118]
(SEQ ID NO: 208)
MGLFPERLYQTARIEQVQHTTVFMSKTPPTFRALDLGFGFTKFSKGHYLQDGSLEVSAFP
SYAAAAVNFSIGAGVMTDLSIVKVSVDDEHFLVGEDVRNAADGVGRQMLESTFFTSSQ
YIALARGAMGFMNVPNHGEVDSLVMGLPLNIFRDQSIVDHVEAAMKGTHLVPDITKNS
GVERTILVKNVSIIPQVVGSLVAMSRDAGLMQKVNEQHNLTIDVGYGTLLWLVSDGFTP
VPARSNGNMGGVSSLLQKIIRSIDPSAVSSINIMDRLDKALLEDKASILINGAEVEVAKYH
RQLASAARENLTEMIRSIGTKADIDNVFLTGGGAHLYKDAIAAVFPGRQVHIASKGSRFT
NVRGFQFLAETED
gi|90962843|ref|YP_536758.1|hypothetical protein LSL_1868
[Lactobacillus salivarius UCC118]
(SEQ ID NO: 209)
MSKNNILKLNVANDLGYGSVKAKVEDTNIHFPSVIAIQREQDLNKPVEFNSNQEKLTYL
EGMINHMDVTISSSAVKTQGRFLVGNAAIKSSLPLKAFDVNDFTGKSDNDLAIILTLSMI
AAQRISLAVKNGEDLSDQLSTEINMTTALPVSEGKKNGIINNYVNKYISSKHTVVFHNFK
DPITVSLNFKNVYVALEGEVAQLYLKNSDIKLQGLIKQDFSKNYPELANDIKVSDLVKID
NLLGIDIGEGTTDLVVIKEGHANAVASTSLPTGYGNALQDAIDVLQTENMNFEARSQLQ
DYLAQEVSPLAKRMQTKVRQIVFEQLEPFADKIVTAASKTMRKAGANVEILYVYGGGSI
PMLEQTALRQKLSQKMKDFSGGIDVPVIWINKSYAQNLNEKGLELILKAMNK
gi|91791236|ref|YP_552186.1|hypothetical protein Bpro_5434 [Polaromonas
sp. JS666]
(SEQ ID NO: 210)
MPEIVAIDLGYGHTKVVSQGRDGEIKRMIFPSVAPITTRERTAESNGMGALRTVTVCVG
ANNYVIGKDAYLEADSNYSRSRLDEYSQTDGYHALMLGALALSGLREIDQLVIGLPLTT
LDTYHSVMSSKYLGEHSIGATYARRKVELAVRNVLVTSQPAGAMINAVAGQPGLKKAT
NLAIDMGYFTMDFLMCEGLRPFYKRSGAVQGGMSGYYDHLNGMVAEKITSEGLPAQS
TVDHFRLEETLSNGIQGENGRTIYSLRIGKLEVDITECVERASTRLTEYLDRMMTTLGGG
SSMGIISSVVLAGGGARMILPAVKERFGKTHDIVMQDAAQYAIANGFLHFGLASAKRAA
AQV
gi|91790780|ref|YP_551731.1|hypothetical protein Bpro_4960 [Polaromonas
sp. JS666]
(SEQ ID NO: 211)
MKPETPMVDVRAVDVGYFSTKLTLARNLEGNASTIASMKPETPVVVDVRAVDIGYFST
KLTLGRKLVGNASTIATALFPSLAPRLPASMSMQTALHGKPDGSVVDVDDVNYFVGRD
AILYSSGREPREVLADYSMTDKYHALMRGAFHYIAQDAKATSELVIRHLVMGLPLNTFG
ENRDRLAARATGEHLLPDPSNPGSMRRITVEKASVIVQPQGALVSYGTTHREIFKEGWV
LVVDPGGGTLDWYVARGRLPNWQRSGAYPKSMLACAYAVADRIDPTWRDNFEIIERID
KAIRDKAPSFMTAGNTYELAPYTSAIEAVLKESTDKMVARLGSLDNLDLILFTGGGAKV
YFDFFKSRNPKLTNIMFMDDDPVFSNVKGFHVAGEIMSKSRTI
gi|153822523|ref|ZP_01975190.1|conserved hypothetical protein [Vibrio
cholerae B33]
(SEQ ID NO: 212)
MFVLGVDIGYSNLKLAIGQSGSEPKTIILPAGAGPADRMPERIGGGDDETCLYVSVDNER
WAAGVPAGRLQGWERELHPEYPTTKTYKALFHAALLMAETESIDLVVTGLPVSQFHEP
QRKSDLVQRLKGVHQVTPKRSITVHDVKVLPQPAGAYMDLVQTGGDLGLIEEGRVVVI
DPGFFSVDWVALEAGEIRYSSSGTSLQAMSVLLETIDKLISEDHGAKVGMDRLEKAMRT
GDLQVLLFGEKVDISPYLNAAMKKVAPVALTAMRQSMRDESINADLVLIAGGGALAYK
EAAKEIFSRSKIIVPEQSVLANVRGFWFYGA
gi|38637991|ref|NP_942965.1|hypothetical protein PHG330 [Ralstonia
eutropha H16]
(SEQ ID NO: 213)
MSTNTIAVDVGYGNTKFAFPLGADVAASMFPSLAPTRSASSLASHGGGYFQARDVVHV
TVDGAEYEVGPDVSITSAYGNNGRTLSEDFVTTPEYAALLFGALHYSQARDVGQLILGL
PVHTLQKYAGALQERFTGAHDFGAGDVTIKRVVALPQPLGSLVTFMRQSGKELDPDDN
CLIVDVGYFTTDWVVARGYMMDDTRSGGVPGGSSRIYKQVATLLSADEGGEPTGDIERI
DKALRQGKLMRYYEKMVDLRPYFEVAKAQCQMAVKEMQTRVGRTEDIAAIVLTGGGS
ALYSGAIRAAFPRSHIVAMDSPCFANVRGFFDIGSARQARG
gi|190015749|ref|YP_001967754.1|possible plasmid partitioning protein
[Clostridium perfringens]
(SEQ ID NO: 214)
MILGLDIGNITSIGVGDKEDFITESRLREFEELDDFSGNDIVEINDKKFIFNEGYFENNVVK
HEKENFINLLYYTIAKTLDKENSKENDVKIVIGVPAGQYNSEKERLKKVILNNQCKNIKI
NGESRTINIEDIFIAPEGYGAKVEALQAKKEKVKLLMVDIGGGTSDAALFDENGRFIGGK
SIKVGLLDLYKNVQEVLDLKYKLSVSLEDARKYFDGELDIRNEKFEVENTYKTEALNKL
VKFLINELRGLYPNISQYAICLCGGADGRILPVFKKVYIQAEAITDIKANAKGFRKVGLA
KWQNQGK
gi|219669299|ref|YP_002459734.1|hypothetical protein Dhaf_3280
[Desulfitobacterium hafniense DCB-2]
(SEQ ID NO: 215)
MFENDILVAGGDPGFGAIKLDAGDTKVLFPAVICKGNERIFSALGNGNVSRGTDEEMQI
GSLDVIVTNHSTGVSRHYFMGSLAESLNPNEAHYCWDEDKSTDEEATALLVVALAVAQ
KEPKANIYLGTGVPVKYYAALKDKYEAELKGTWSVAFRSGPFKGQTRQLTIIRSRVLPQ
SYGVFIKETLNEYGIPISPKLFNGYVVVIDPGFRTTDVATFYDGVMLDPPNSFSIEKGLKW
AYTGVAEQLKEMTINHANPIETDDKELDKVFRVNEGMYPWNNGAINLNPVMQDMLGQ
LGTDISREVKKSLKPMLGKIHTVLVAGKVGEMIFEHLQFENKVLIENPQFGNATGFRIMA
ANLVNNITKKANAAP
gi|121593973|ref|YP_985869.1|hypothetical protein Ajs_1600 [Acidovorax
sp. JS42]
(SEQ ID NO: 216)
MELIVRAVDVGSGNTKFVTGVTGTEIRCASFPSIAYPSSGETPQWPASERRKTVCIPVGPL
FYEVGPDVGLAADTFRAKQLHDEYTESPEYMALLRGALSMMKVPHIDLLIVGLPVALFI
LKKAALEKAVVGSHQVGGGKTVTVAKAMAVAQPQGALVHYAAEHQKIETIGTEQSLV
IDPGSRTFDWLVTRGMRLVQKQSHSINRGMSDVLRLLAAEISKDIGTPYRDFDAIDLALR
TGKAPVIFQKPYDMKKHLPLAESVAQQAVSTMRQWIETPESLQNIILVGGGAFLFKKAV
KAAFPKHRIHEVKEPMFANVRGFQIAGHNYAASAMASGRDRGAGEAV
gi|110804060|ref|YP_699969.1|putative ATPase [Clostridium phage
phiSM101]
(SEQ ID NO: 217)
MILAVDLGNYNIKTSENILFESRYEEVEKEDFDTDLLEFDNKSFRMESGDFENEFNKAKK
QYIPNLLYAIAKSCDKNKVEIDLVLGVPASNLGISENFKTELSDREFKFTLFGTKKVVKIN
KVATVAEGLSSFYTLPKEERLKDIVLLDIGGRTINVCTFTGGKCSLKFTVPGGMLDLYSQ
IQEDYNKVGNNADVEEIIRLIKNDTIDASNAKERFVKSQLNKIRLQVPNFSTYKVYLVGG
GSLELQEALRNQLENINFVPDTVFSNAKGNKLIAKAKWGE
gi|121610594|ref|YP_998401.1|hypothetical protein Veis_3667
[Verminephrobacter eiseniae EF01-2]
(SEQ ID NO: 218)
MPDVIAIDVGYGNTKPVWSHDPDKSGKERWGEACFPSITPMAMVDEESTGGAYNPDRI
LITVRNKGYYAGPAASMGIEARTLDPDYIESDDHEVLLRAAIHWAMREKRALLPAIDML
VVGLPVSGFSARGKRLRDIALAPRDVPVPRVLQTSGVPAVITVRAKQVKVLPQPFGSLR
YAAQNLPDTDELFSDRALSMVIDPGYRTFDWFVANGMRPEMKLSGSFDGGVSNILRQV
SQKIGYEHGTGSLEFDQVEEGLLRGAINLGYKVIDTRPYQAVVLDAARKEVMAFLGRID
ANKARLRRVFLTGGGASYYKLALAEKLPGYQIQMLDNGLMGNARGFWLSGYDDFDV
gi|118443715|ref|YP_879207.1|hypothetical protein NT01CX_0741
[Clostridium novyi NT]
(SEQ ID NO: 219)
MSKGNNIVDSFSVQVIDDGYADTKSRGEDTNMIVTPSYVTSWRPSYNKDNDLQEEKIDK
LSRIEVKVNGSKYLVGQCAVKQDRNIQWNGAADKHDDTSFDILLKTHLSLLNKKPMSR
VKLVMGLPVSASLDKERIEKMKAKVLRQHNSALRLYGDKDFQNKIVKVEDLIIKAQPH
GTLCDLILDSSGNLTNKDLARKVNAISDIGGKTHNLYLVDALEPLSDFCDTKNSGMYIA
YMWIKNYIEQELHLNVSDGQIQYIVASGQIKGYDLTPVIQKAYRSLARKIILEIRTVWEN
AFPFIDNIIFTGGGATVLKPYLQEEFKNAMYLTRNQNASGLFKQGIRKWKRKAV
gi|118478456|ref|YP_895607.1|hypothetical protein BALH_2828 [Bacillus
thuringiensis str. Al Hakam]
(SEQ ID NO: 220)
MKSLYAIDVGIGFTKRAYRQDEDSEVTVKSEASTLAPVPNHDESEDLTKVSFIDLDFAYY
MGNEAHQSDASFLPPFEEEIENYYESEQFKQQIFGCIAKDYKENVVLPLVVTGLPVTYFG
SQHEQLQRALKKETSVQIDGKFIHITVENALILQQPVALHAYFLKEGIIQERDRILIIDGGF
RTLEMTDMKQNVILNHYETELGCSKPLKNIKNILQNHAGESNQLHINDMPNILEKGYGG
REENPQASQVHTLIQKELDTHFQDVMCVLQEQFKLDQYDTIIWTGGIVDLHKKRIEKMQ
GEISSFRMVDASKEAALHGYYMIGSQVFDDITNQSVYESKL
gi|118478108|ref|YP_895259.1|hypothetical protein BALH_2464 [Bacillus
thuringiensis str. Al Hakam]
(SEQ ID NO: 221)
MSILLKAGADAGNNGLKLMVKGQDPIFIPSIYALYIGEPTGLLDEEDVSLSELENHIDVTI
SSPSLMLNNVRYIVGEKVIQDQLKGTEVEKKSNKSTDELMVITILSGLAVSAMRQSPTSS
HINIRYDLSVALPMQLITQEIAAENAKRYMGNHKVVFHYPNGRDVTINISIEYCKCLPEG
ASGTWGIVYDEEGNVVKHKIECEQNKVSEIDFVDKTLLSFDIGAGTTEEVVSLGVNFRPQ
LSKGLSYGVKETLLQIITRWNRKYPTKTIDSITEFNQIYLNDKHPRNALLVEESQPALLGL
AARVATDIINKIDDMKDDPYVFIYGGGAVIIKNSLKMILKQKGRLTNVIFVDNPLFTNAR
GLLVYTCSPKYREHKQKELGFTNLTIS
gi|172064562|ref|YP_001812212.1|hypothetical protein BamMC406_6538
[Burkholderia ambifaria MC40-6]
(SEQ ID NO: 222)
MKTAVFAVDVGYGNTKYAHRAASGTIATGMFPSLTPLAASRTLSGYGESVLTARKVSTI
VIDQVEYEVGPDVPLTAAYGNTGRALADDYVLSDNYAALLFGAIHFSGVTHIERLVLGL
PVHNMKKYSAELKERFAGELDFGAGRVTVDKVVVIPQPLGSLVLASSNRQHEFGRDVA
HLVVDVGYFTTDWVYANGFTMDDNRSGGMPGGASQIYQRIASLVARDQGDEVEDIERI
DKALREQTPFFFYGTNIDLAPYLEQAQPLISGVVKEMQNNVGRLPNVRSIILSGGGAALY
AAVIRRAFPRVLIEVIDAPCLANVRGFLMVGEAGLARERR
gi|161522610|ref|YP_001585539.1|hypothetical protein Bmul_5577
[Burkholderia multivorans ATCC 17616]
(SEQ ID NO: 223)
MKTAVFAIDVGYGNTKYAYRAATNAVVSGMFPSLAPLAASRSIAGYGESVLTARKVAT
IVIDQVEYEVGPDVSLTAAYGNTGRALADDYVLSANYAGLLFGAIHFAGVDHIERLVLG
LPVHNMKKYSAELKERFTGELNFGAGRVTIDKVMVIPQPLGSLVLASSNRQGGFGRDVE
HLVVDVGYFTTDWVYANGFTMDDKRSGGMPGGASQIYQRIAALIARDQGDEVEDIERI
DKALREQTPFFFYGSNIDLAPYLEMAQPLISGVVKEMQNNVGRLANVRSIILSGGGAAL
YAGVIRRAFPRVVIEVIDAPCLANVRGFLLVGESSLARERR
gi|119493931|ref|ZP_01624493.1|hypothetical protein L8106_27631
[Lyngbya sp. PCC 8106]
(SEQ ID NO: 224)
MQSNKQPVGQPAVGPNTIMNRQTTTTTTSSRRTILSVDLGRTSTKACVSRNPNEVVFIPS
NVAQLTVEKARGGGFESENTDPLLDLWLEYRGDGFAIGQLAADFGANLFGGNDTDSPS
KVNDALIKIFACAGYFKMKGDVEVILGLPFYSQEQFEREKEQIISLLMGPHVLLFRADQIT
IDIKSVRVMPEGYGSLIWCEAQKSKETPNFADLSVAIVDVGHQTTDFLTVDRFRFARGVS
QSEVFAMSKFYEEVATKIEGADSQSLYLLEAVHRPAGQRFYRPRGSAKPVNLDEIVPEL
RKKFAQELSSRLVEWLPERVTDVVLTGGGGEFFWEDLQPLLKQAQLRAHLAQPARKAN
ALGQFVYGEAQQVKR
gi|119511106|ref|ZP_01630224.1|hypothetical protein N9414_16841
[Nodularia spumigena CCY9414]
(SEQ ID NO: 225)
MTDQPSAATPMNAAAIPLNRAANIPINANPATNRPNLGGKTILSVDLGRTSTKTCISREP
ANVVFVPANVKKMSIEQVKGGVFEARATDPLMDLWLEYQGYGYAVGQLAADFGANL
GVGQSKVEDALIKVLSCACYFKLKDEISVIMGLPFLSLEQFEKEKAQLTSQVTGPHVFNF
RGESVSLNITKIWVMPEGYGSLLWSEAQPKTGGKVPDFTKISVAVVDIGHQTIDLLMVD
NFRFARGASQSEDFGMNKFYDMVAAEIDGADSQSLALITAVNKPKGERLYRPKGASKP
TNLDDFLPNLIEMFSRDICSRVLAWLPERVTDVIITGGGGEFFWEDVQRLLKEAQINAHL
SAPSRQANALGQYIYGEAQLSVGRATRA
gi|187928639|ref|YP_001899126.1|conserved hypothetical protein
[Ralstonia pickettii 12J]
(SEQ ID NO: 226)
MKAATVAVDVGYGNTKFAFPMGSETKLNMFPSLAPQAAPRALANHGNGFFKARDVITI
AIDGVEYEVGPGVSLSSAYGQTGRTLSEDFVTKDEYAALLGGALRLAQVSEVGQLILGL
PVHTTQKYASYLRDRFTGTLDFGGEPVEIGSVICLPQPLGALVTFMRQQNTKFDADNAH
LVIDVGYFTTDWVVAQGFTMDDNRSGGVPGGSSKIYQQIASLIEQDEGEPVTGIERIDKC
LRDKKPMLFFDKEIDLTPYLEKARSVCQLAVKEIQTRVGRTEDIRAIILAGGGSALYVPAI
RAAFPRTPIHALSSPCFANVSGFYDIGSTRPVKQK
gi|153800418|ref|ZP_01955004.1|conserved hypothetical protein [Vibrio
cholerae MZO-3]
(SEQ ID NO: 227)
MFVLGVDIGYSNLKLAIGQSGSEPKTIILPAGAGPADRMPERIGGGDDETCLYVSVDNER
WAAGVPAGRLQGWERELHPEYPTTKTYKALFHAALLMAETESIDLVVTGLPVSQFHEP
QRKSDLVKRLKGVHQVTPKRSITVHDVKVLPQPAGAYMDLVQTGRDLGLIEEGRVVVI
DPGFFSVDWVALEAGEIRYSSSGTSLQAMSVLLETIDKLISEDHGAKVGMDRLEKAMRT
GDLQVLLFGEKVDISPYLNAAMKKVAPVALTAMRQSMRDESINTDLVLIAGGGALAYK
EAAKEIFSRSKIIVPEQSVLANVRGFWFYGA
gi|125623971|ref|YP_001032454.1|hypothetical protein llmg_1140
[Lactococcus lactis subsp. cremoris MG1363]
(SEQ ID NO: 228)
MNIFAIDLGNKRIKMKSERGEYSYPSSYLNAEQVVTGGLGSEIIEQNYHFQTIQDSTNSFI
WGPNLEVYNLPERMIDTYARSGRMKQKKTIRIFEFALGRLVMDFPEAFESPLVVHLMLG
LSITDMHQESDTIDMLKKLAVGQHQIIIGGRVVTIIIPSEEFLSIIPQYMGTVLNLAFDQDY
QRNRRFSDGRIGVIDIGGGTILINRSVALNPSPIGDERFEGIQNLIKEIGRRINSTKSFLIEEM
LRSVDSEGNYVYPPNSNVQDSKNVSPIVEGEIERYTRFTVAPLVTENFPDIEEVDFIVVTG
GGASLLAKEALKDEIGEEYFSRLLFLNESEFANVRGFYKGGYLKWHSSNEELAVEARRE
KPAELQESQTRDVIVPPIRNTETSMDRELLEAQQKLQALQSEIDGVQIEFEN
gi|124514596|gb|EAY56108.1|conserved protein of unknown function
[Leptospirillum rubarum]
(SEQ ID NO: 229)
MSKTKPVRSPEQEFSEEPVIDVGLDDGYAAIKLAWYGPDGTLRTHSVPSRARSGSLGVG
SLFGDSALSVGGYETEGERFTVSPGLEGEVTRFPDYNLSPLARVLAHHALIAAGFAGKQ
VRIASGLPLDRYFRDGKEGKRKDEHRIARKIESFARPVRRLDGTGTARIVSHSVFAQGLA
AVVDWLVEGTTIRSQKDPVGVVDIGGQTTDISVINPDFQANHGHLKTCDLGVLDVRDLL
GRRIQSSHDVDKISDSALDAALTTGATRIWGKDVSVQDELRDAIREIESRLANEILSVFGK
EASTLETILFVGGGSLVFRNLPTRFPNAAVVDCPEFANARGLLKALSLSGRS
gi|126640709|ref|YP_001083693.1|hypothetical protein A1S_0642
[Acinetobacter baumannii ATCC 17978]
(SEQ ID NO: 230)
MGKSFRLPSRVANGRTIIGDTDEVNKQIIHVNGKYFTVDEFTKEHIDTRTEDYPLSDANV
ALVHHALHQAFDGQYRKFKIATGLPLNRYYGGKDKAKNEKLIADKTQNLLINKDFNNP
TVYNLYEHDKKNDPLQILNHIVLSEGQCAYFDALMDDNGKRSSMYEDLWEGGCAIIDIG
GRTTDIAMINPRGGTMQASRCDTLDVGIITLKNKVSQNLKEFFGLSSNITDWRLSKALKT
GIYNHGGKDHDISKILNAAKVEITDQIENSIKVNVQDGQDLGAVLLVGGGSITLGDELLK
RFNYDNWHLVKQPEFANARGMYKCAKYISKL
gi|126660579|ref|ZP_01731683.1|hypothetical protein CY0110_31855
[Cyanothece sp. CCY0110]
(SEQ ID NO: 231)
MSDLTMALDFGSSLGRAIYTTSSSYVKPELLLLDPHVVEVPNISIANYEKYKVGNPSPQD
SSWVNLNDTYFAVGFLAKRQFSTIHCLNSLKIDSAIPLTLAMVGAVAEIKGLGTTFSLDL
GVLLPWSEFKDKDKLKSVLDSALQSFEYRGQQYHVTLQAFDALPEGGGLFARGRVASK
GKPMKRVTETNLVVLMIGYRNASILVVERGELTIGLTSEFGFSQMITKIKTFTSGQSEDVL
IPAICTGKSISDRTLERLARSQRAELREAEKKEIKDAIEDSQQEYVATLTNWISQQIPPHLE
IDEILLGGGTAKYFKRNLTTLLKSYGAQINWSQSLEKRVVQTFGNEVSKNYLASRLADV
YGLFYRLLKKPLPRLKEVVTRESA
gi|126667805|ref|ZP_01738772.1|hypothetical protein MELB17_09158
[Marinobacter sp. ELB17]
(SEQ ID NO: 232)
MKRPLSIAVDNGYYDHKVAYWDGDVIRTFKYPVVIGSKHEVMSTMDGQLVGMYETEG
VRLVVDPTINNKIPLRYDEYGSSKENRTLVSHGLYKAGVAGGQEVHLTTALPFRDFYNI
DGSLNRPLIDAQKANMLVPVSLVASSDGPLDPIANVTQSRVMSEGVAAVIDYLVRDNSG
QARKMRAPIAVMDFGGSTFEVVTVMPNMNIRHSSSDTMKRGTYDIRTSFAPMLADYLR
ELGFKMKHAADWMVTEAFETGSIEFPGVGIDAGNRVIPVKHIIEEAAKPIVNEIKKFTQA
KLPNMAEYEAILLVGGGGLLTESLFEDWKEEFGLIVVDEYANARGMLKVALIA
gi|134044554|ref|YP_001101879.1|hypothetical protein YR71pYR1_0185
[Yersinia ruckeri]
(SEQ ID NO: 233)
MSQFVLGLDIGYSNLKMAMGHKGEEARTVVMPVGAGPLELMPQQLTGGAGASIQVVI
DGEKWVAGVEPDRLQGWERELHGDYPSTNPYKALFYAALLMSEQKEIDVLVTGLPVSQ
YMEVERREALKARLEGEHQITPKRSVAVKSVVVVPQPAGAYMDVVSSTKDEDLLEIIQG
GKTVVIDPGFFSVDWVALEEGEVRYHSSGTSLKAMSVLLQETDRLIQEDHGGAPGIEKIE
KAIRAGKAEIFLYGEKVSIKDYFKKASTKVAQNALIPMRKSMREDGMDADVVLLAGGG
AEAYQDAAKELFPKSRIVLPNESVASNARGFWFCG
gi|138898362|ref|YP_001127547.1|hypothetical protein GTNG_3469
[Geobacillus thermodenitrificans NG80-2]
(SEQ ID NO: 234)
MKLVVANDIGNSETKMIVNNTLIKQPSVVKRLLSKPNVMETNVEKNIANLLDELIVHVT
SNAIKRSGLYFIGKRANMTADKVENMNIKLGNKSKHDIPVLMTLSMLAARSVQLAYQE
NQELPPSISVDVSMTTAIPASEYSADQARYLEGRFTSNDHVVIVYVGETPVTVTLHFQTV
KVTQEGIPALYALLESENEILKNYNEHYKKQAVPKDFANKRILHVDIGDGTTEYIYTVG
MNPVTDVCSGEKRGVGHATEEATQLLKEEVGGFLNLNRQQFMDIFRDPSHNLHDLAVR
FMQEARYSQAQRILEDIQEKYSDIAGNVDVIAVYGGGSIQFKEELYEELLDFANTVHCEV
LWIPEKYAVDMNVNGLHVINEKILFKQHA
gi|145301264|ref|YP_001144104.1|hypothetical protein ASA_P4G053
[Aeromonas salmonicida subsp. salmonicida A449]
(SEQ ID NO: 235)
MKQFILGLDIGYSNLKIAMGFKGGHVTTTVLPVGAGPLALMPQQLTGGEGNCIQIVIDDE
KWVAGVEPDRLQGWNRELHDDYPATKPYKALFYAALLLSEQKEIDVLVTGLPVSQFM
NPELREALKKRLEGEHQITLKRSVTVKSVVVVPQPAGAYMDIVSSTKDEGLLEVLREGK
TVVIDPGFFSVDWVALEEGEVRYHSSGTSLKAMSVLLKTINLLIQEEHGGSPGIDKIEKAI
RSGKNEILLFGQKVGLKEYLDRESFNVAQNALIQMRTSMREDGMDADVVLLAGGGAE
AYKAAAKARIQLRSATLAYAA
gi|148245152|ref|YP_001219845.1|hypothetical protein CKL_4044
[Clostridium kluyveri DSM 555]
(SEQ ID NO: 236)
MVILGLDNGYHFTKTSEGVMFSSTVRKGKDIDINADTIQTNIDGQDYVVGAPNGEYVAD
SNKIDSIVTEICTFTAIAKSFPENKLIDCNIVAGLPVSYYSKQKSDFKEKLLGYGNKKVKL
NKHNFQINIVGAEIYPQSAGVVFVNSKDVKSDDSLVVDIGGGTVDVSAFHGLRLTNMAT
YNLGMLVLYSKLAQKLNSEYECKFMDYELYDKLKKGYITSNKFGRIDLEILNDDIEEHT
NVILNNIKRDFNYNSMDNIFVIGGGGVELYDRIKQKFKNAILCDDAQFVNANAFELMGQ
MKFATK
gi|149180011|ref|ZP_01858516.1|hypothetical protein BSG1_03310
[Bacillus sp. SG-1]
(SEQ ID NO: 237)
MRRDYMERSNFLAVDIGNSWYKVLASTDGVVSEYQMPNAIALFDDEFYEMPYEEEDV
EIEENLIVEVKSPSVMNKREIFYAGKSAARQRNVSLTSVNNQKVDEVRTYILLFSAAAYH
ALLTSENEMDIVYEIDQLAVSLPTTQYKEKKEQLKQRLIGSHTVILHKVPGVPEPKEVCV
KIKINDVIVGAEGACAYLGLTRDQETLGIKDDGLVKDSAKGILIGDLGGDSVDFVGIKNS
KPVASVEGEHFGINQFLDIIIQKVSKNELYKFDSRSELEEKLYAGQSEWYVEPFAGVRKD
ISKYVIPQLKSMAIKYLELFDRVRSSSNEIKGASRYIAVGGAAKLAQKQIQEAAVRWSEK
GRPINLYFPEDLEKLNVLGLMILAKMNHLKKQQEETTDLAATRG
gi|241114216|ref|YP_002973691.1|hypothetical protein Rpic12D_5220
[Ralstonia pickettii 12D]
(SEQ ID NO: 238)
MKAATVAVDVGYGNTKFAFSMGSETKLNMFPSLAPQAAPRALANHGNGFFKARDVITI
AIDGVEYEVGPGVSLSSAYGQTGRTLSEDFVTKDEYAALLGGALRLAQVSEVGQLILGL
PVHTTQKYASYLRDRFTGTLDFGGEPVEIGSVICLPQPLGALVTFMRQQNTKFDADNAH
LVIDVGYFTTDWVVAQGFTMDDNRSGGVPGGSSKIYQQIASLIEQDEGEPVTGIERIDKC
LRDKKPMLFFDKEIDLTPYLEKARSVCQLAVKEIQTRVGRTEDIRAIILAGGGSALYVPAI
RAAFPRTPIHALSSPCFANVSGFYDIGSTRPVKQK
gi|241589633|ref|YP_002979658.1|hypothetical protein Rpic12D_4769
[Ralstonia pickettii 12D]
(SEQ ID NO: 239)
MSKSTPAIVRAIDVGYGNTKYTLSQRNIDMDAEVGLFPSLAPRATQSDFTGGLMAKADR
IVVQVDGESYSVGMDALAESKGIYKREVASAYSTSRAYRALFLGALQKMRLTAIDYMV
VGLPLTTYDRYAKELTELLTGTHEVPNPMALDQALKVTVRRVKVFPQPSGAFYNYAVP
RKLLQSMSQQTNLVLDPGYGTLDWFVTEGAKPLTGRCSATPKSVWAVISAVADHIGPD
LTSNPRTMSRIDNALRTGAPLTINGKTIDISPFKPIVDQIVADAINDMLMSIGNLSDIDNILI
TGGGAHLFVDHVKKELGKTHSQIHVDTDPVYSNVRGFQYAGEFWAGMDRQRAAA
gi|152977413|ref|YP_001376930.1|hypothetical protein Bcer98_3741
[Bacillus cereus subsp. cytotoxis NVH 391-98]
(SEQ ID NO: 240)
MSGGKMKLKTYKVEGTEYVWGDDIIKVNNTLNTYAQQNRYKTNQYKTLSKIALAEMA
AKTNVKSYDEILVITGVPSEEIGTKAVDEIKEVYQGAHDLEVNGKKVSINVVDVIVLAQP
VGTVMSRYLDEDGFVADDTYEDMTVGIIDIGTGTTDLDVISMLRREKESTSVPKGMHDV
YEPIVAKIKKETSATINDYKLEKVFEEGAYQASKRMDPIDFNDEKTASIKEVYDFIVNGV
NNAWKTFDRFDEVLVSDGGANTFHELLEEWIGKVTKLEESQTANVEGFYRYGKFEVGE
EDGE
gi|153874654|ref|ZP_02002791.1|conserved hypothetical protein
[Beggiatoa sp. PS]
(SEQ ID NO: 241)
MFNLKSQRKVQLAIDIGNRLLKSCTSNGAIKTLPSWYKDLEEWDMPHSDKNSVVIHYLQ
GVNTNLVKKSWAVGNVAQDLGGNPTFESEKAFLAPKLALAMIDAGGGTQQITVERLVC
ALPNELQEEKVDAIVKGLTGTHQIKRNGEELKIEIEKVEVQPETLGAFKWVLANKSFKY
ARINGILDLGGKTGIGQLYTKNGTLIRESRIIVGGTYQLAQFVAQHPKLIRLDTTPQLSLIM
DAIADGSLSYGTMDINFADKFPIYVSQWLDDIRNKLKLSWSKWLSELGEVVIVGGSAVL
AKPIVDQTAGRFKIVKENSQFCSVLGMLQ
gi|153930634|ref|YP_001393404.1|plasmid stability protein StbA family
protein [Yersinia pseudotuberculosis IP 31758]
(SEQ ID NO: 242)
MFSIPSRASYDVSIINIEGNDKSFIFETHNNKKFTVDESVPSPLDTRNIAIPYPVSDLNRVLV
HAALINAGYAGKDVHINTGLPVSHYYKPSTEINQTLVEQKKANLMHPVRCGIDGSLPVA
NIIANEVCSEGVAAYVDQLLDADGNTTEQYEEMYNSVVGVVDIGGHTTDCAVLLPKMV
INMTRSGSSEVGVLNLYDGIKTAVAAKFGINSSSITKRQIESALNTGKIMISRQAIDVSDIV
NTEKTRLFDQIIMAINEVIGTDEDIEKLIFVGGGSIVFEDYLRDHYKSIIIPEHPEFANARGM
MKLVKYIPKSN
gi|156564188|ref|YP_001429698.1|mreB-like rod determination protein
[Bacillus phage 0305phi8-36]
(SEQ ID NO: 243)
MYIFGCDIGFKQFKGINLEDDIEFKFPNIIGFPTSLEIQNATDHGETMKDLWLTYDDETYY
VGDKASEFATNHRYTFLANKVDTIDETVKLLTGLGLLYETGQNKIDLMVTGVPVEEYFL
VKDKIETEFVRDYDYSFRGRKCRSTIQKVVVVPQGAGDYYDYILDESGQVITERVKPKT
VIVNIGYRTTEIVTMNNGRFSRSESTTLYTATNNFHKELRRLLAKEYGIRKNLTQIDEIYR
ERKVYIKGIATDISELITSAIDMHVGSISGEIPVWVNPDDVHEILLTGGGSTGLTPFFQSQF
GDIILKHDNPEFGNARGFAKYGRLIAHG
gi|218782799|ref|YP_002434117.1|hypothetical protein Dalk_4977
[Desulfatibacillum alkenivorans AK-01]
(SEQ ID NO: 244)
MDVLGIDIGFGFTKATNGKEFLMFKSLLGEAAEIPFRANLANSSFTENLHVTVDEQTFFV
GDFAERQSGVRQSTLDQDLLVQEFAKVLALTAAGIFSEKYAPMNVVSGLPVGYFTEYK
EAFVKAILGHHTVNYHKADGSVVTRRININRVRMIPQPMGSVLNLLMDERGRITDRDLA
NKKVGVVDVGFKTTDFIIFDKLQFITRGSRTIDTGISDIFRTIANKLRKQVDVSLELYRLY
DPVSKGSIRIRGQELELAEIRDHVYAQAAGEIADEINQIWADDWDMDTVVLTGGGGME
LAKHLQPLIAGNVVGIPNDVDARLNNVQGYLKFARHLWEKDEPPPAREESAE
gi|166091597|ref|YP_001654047.1|hypothetical protein pFR55_ORF058
[Bacillus thuringiensis]
(SEQ ID NO: 245)
MKIGRKVADFGNSFNNFTVDGYYFELATNVVKVSKKKAEDLLVERILNPEDLLDRLLIS
TEIDGEESYYVLGQLAEDNQLANSHVNKMHDKIKSPIPYISFLGAIAYYHALNADKEDD
EVEIDYMSMMLPIWLLKREEKFSIAHKMMEQRFIGEHKVKVLTPGMERELTITVNSAKC
RNESEIARHSLKYKMVAKDKNSNVISIEKRLEAEKFDDFEVVLTDIGGGSTDAVRLGKG
LTTPKHRDSFQVIDIEPFLGYIDRFRKEKVLQYFKDLRTLETFIVKNYKDQEYVLIDENTG
QEHDFTSEIVEALQEYAKILVAKVLDVFIPSSTNTVLKFIYIGGEAPVLEPYIRLALLEHM
NETAAKNNHFFLSDIIKHDEKEIFAPTSRTINLAALELKAIDETKEQLA
gi|206974477|ref|ZP_03235393.1|conserved hypothetical protein [Bacillus
cereus H3081.97]
(SEQ ID NO: 246)
MKSLYAIDVGIGFTKRAYRQDVDSEVTIKSEASTLAPVPNHDESEDLTKVSFIDLDFAYY
MGNEAHQSDASLLPPFDEEIENYYESERFKQQIFGCIAKDYKENVVLPLVVTGLPVTCFG
SQHEQLQRALKKETSVQIDGKFITITVENALILQQPVALHAYFLKEGIIQERDRILIIDGGF
RTLEMTDMKQNVILNHYETELGCSKPLKNIKNIVQNHAGESNQLHINDMPNILEKGYGG
REEDPQTSQVHTLIQKELDAHFQDVMRVLQEQFKLDQYDTIIWTGGIVDLHKKRIEKIQG
EISSFRMVDASKEAALHGYYMIGSQVFDDITNQSVYESKL
gi|218904297|ref|YP_002452131.1|hypothetical protein BCAH820_3181
[Bacillus cereus AH820]
(SEQ ID NO: 247)
MKSLYAIDVGIGFTKRAYRQDEDSEVTVKSEASTLAPVPNHDESEDLTKVSFIDLDFAYY
MGNEADQSDASFLPPFEEEIENYYESEQFKQQIFGCIAKDYKENVVLPLVVTGLPVTYFG
SQHEQLQRALKKETSVQIDGKFIHITVENALILQQPVALHAYFLKEGIIQERDRILIIDGGF
RTLEMTNMKQNVILNHYETELGCNKPLKNIKNIVQNHAGESNQLHINDMPNILEKGYGG
REENPQASQIDTLIQKELDTHFQDVMCVLQEQFMLDQYDTIIWTGGIVDLHKKRIKKMQ
GEISSFRMVDASKEAALHGYYMIGSQVFDDITNQSVYESKL
gi|167630473|ref|YP_001680972.1|hypothetical protein HM1_2411
[Heliobacterium modesticaldum Ice1]
(SEQ ID NO: 248)
MNMHAARLRQLPGFEPGEGKNLTVGLDIGFGYVKVVAGNGRWALFPSIVGEGRELHIL
SGFGSNDPIDNLVVDVDGRRYFVGNLALRETEAELDIDPDKIFNIDFEVLVYTALALVSD
KSDQDVNIYLGLPINFYRTQKARFEDKLRAHQMSRFVKILGQDVRLIRIGNFEIFPQAGG
AIFNQILDFRSEVRTPRLARGKIGIIDGGTKTTDCIYMEDLKFVDQRSFSVNDGGTHKILM
DIRDFLMKNFDHYYPRLAEVDQMLRERKVEVKGKVYDLSSVIDASASRVARKIVREIAA
KWPNHMEFRAMILVGGGGYVMHPFLKEIFPDILLVQDEFEGEAVTGGWNVIQFANALG
FLKLAVMRYGEKK
gi|206969331|ref|ZP_03230286.1|conserved hypothetical protein [Bacillus
cereus AH1134]
(SEQ ID NO: 249)
MKSLYAIDVGIGFTKRAYRQDVDSEVTIKSEAATLAPVPNHAESEDLTKVSFIDLDFAYY
MGNEAHQSDASFLPPFEEEIENYYESERFKQQIFGCIAKDYKENVVLPLVVTGLPVTCFG
SQHEQLQRALKKETSVQIDGKFIHITVENALILQQPIALHAYFLKEGIIQERDRILIIDGGFR
TLEMTDMKQNVILNHYETELGCSKPLKNIKNIVQNHEGESNQLHINDMPNILEKGYECR
EENHETSQVHTLIQKELDAHFQDVMRVLQEQFKLEQYNTIIWTGGIVDLHKKRIEKMQS
EISSFRMVDASKEAALHGYYIIGSQVFDDITNQSAYESKL
gi|196032246|ref|ZP_03099660.1|conserved hypothetical protein [Bacillus
cereus W]
(SEQ ID NO: 250)
MKSLYAIDVGIGFTKRAYRQDEDSEVTVKSEASTLAPVPNHDESEDLTKVSFIDLDFAYY
MGNEAHQSDASFLPPFEEEIENYYESEQFKQQIFGCIAKDYKENVVLPLVVTGLPVTYFG
SQHEQLQRALKKETSVQIDGKFIHITVENALILQQPVALHAYFLKEGIIQERDRILIIDGGF
RILEMTDMKQNVILNHYETELGCNKPLKNIKNIVQNHAGESNQLHINDMPNILEKGYGG
REENPQASQIDTLIQKELDTHFQDVMCVLQEQFMLDQYDTIIWTGGIVDLHKKRIKKMQ
GEISSFRMVDASKEAALHGYYMIGSQVFDDITNQSVYESKL
gi|218233147|ref|YP_002367865.1|hypothetical protein BCB4264_A3158
[Bacillus cereus B4264]
(SEQ ID NO: 251)
MKSLYAIDVGIGFTKRAYRQDVDSEMTVKSEASTLAPVPNHAESEDLTKVSFIDLDFAY
YMGNEAHQSDASFLPPFDEEIENYYESERFKQQIFGCIAKDYKENVVLPLVVTGLPISCF
GSQHEQLQRALKKETSVQIDGKFIHIMVENALILQQPVALHAYFLKEGIIQERDRILIIDGG
FRTLEMTDMKQNLILNHYETELGCSKPLKNIKNIVQNHEGESNQLHINDMPNILEKGYEC
REENHETSQVHTLIQKELDAHFQDVMRVLQEQFKLEQYNTIIWTGGIVDLHKKRIEKMQ
SEISSFRMVDASKEAALHGYYIIGSQVFDDITNQSAYESKL
gi|218898223|ref|YP_002446634.1|hypothetical protein BCG9842_B2082
[Bacillus cereus G9842]
(SEQ ID NO: 252)
MKSLYAIDVGIGFTKRAYRQDVDSEMTIKSEASTLAPVPNHTDSEDLTKVSFIDLDFAYY
MGNEAHQSDASLLPPFNEEIENYYESERFKQQIFGCIAKDYKENVVLPLVVTGLPVTCFG
SQHEQLQHALKKETSVQIDGKFINITVENALILQQPVALHAYFLKEGIIQEQDRILIIDGGF
RTLEMADMKQNLILNHYETELGCSKPLKNIKNILQNHAGESNQLHINDMPKILEKGYGD
RDENYETSQVDILIQKELDAHFQDVMRVLQEQFKLDQYDTIIWTGGIVDIHKKRIEKMQ
GEIASFRMVDASKEAALHGYYIIGSQVFEDITNQSAYESKL
gi|218847833|ref|YP_002454522.1|hypothetical protein BCG9842_A0080
[Bacillus cereus G9842]
(SEQ ID NO: 253)
MKTQLVSRKTKKNQPVLVGLDVGFGATKYISNVHPYLTALPSAVVPGKYKTSNKIVGS
KEVDLENLVVVTEEGTFTVGQLALKVPNTTTKRTVVRDRANDVFSKVLFQTGLGMAVP
HESGEYDVFLVTGLPNKDFELSIKDNLEEFLNKPFTITFPVNGGNEIKKTINVIGLEIMRQP
EGAVTYNQFTFSQEEFLVPSENAKNFIGIIDCGHFTTDYALFRDGVIMEDSITSNSTVAVN
DVYKRLRKVLTIKFDKLGYTEYQAEEEDLDNAVLTGKVEYVEAHDVSEEVGDCVKTV
AKIIAKDILDAWGNETNRVQTILLSGGGSALFSEALKQEFTERKKRGFEVLDVAQFSNVL
GYYMYGCIALTDEKEQSEVFMEFVEPVFGEEEVAETE
gi|196038133|ref|ZP_03105443.1|conserved hypothetical protein [Bacillus
cereus NVH0597-99]
(SEQ ID NO: 254)
MKSLYAIDVGIGFTKRAYRQDEDSEVTVKSEASTLAPVPNHDESEDLTKVSFIDLDFAYY
MGNEAHQSDASFLPPFEEEIENYYESEQFKQQIFGCIAKDYKENVVLPLVVTGLPVTYFG
SQHEQLQRALKKETSVQIDGKFIHITVENALILQQPVALHAYFLKEGIIQERDRILIIDGGF
RTLEMTDMKQNVILNHYETELGCSKPLKNIKNILQNHAGESNQLHINDMPNILEKGYGG
REENPQASQVDTLIQKELDTHFQDVMCVLQEQFMLDQYDTIIWTGGIVDLHKKRIEKMQ
GEISSFRMVDASKEAALHGYYMIGSQVFDDITNQSVYESKL
gi|196041688|ref|ZP_03108979.1|hypothetical protein BC059799_2705
[Bacillus cereus NVH0597-99]
(SEQ ID NO: 255)
MSILLKAGADAGNNGLKLMVKGQDPIFIPSIYALYIGEPTGLLDEEDVSLSELENHIDVTI
SSPSLMLNNVRYIVGEKVIQDQLKGTEVEKKSNKSTDELMVITILSGLAVSAMRQSPTSS
HISIRYDLSVALPMQLITQEIAAENAKRYMGNHKVVFHYPNGRDVTINISIEYCKCLPEG
ASGTWGIVYDEEGNVVKHKIECEQNKVSEIDFVDKTLLSFDIGAGTTEEVVSLGVNFRPQ
LSKGLSYGVKETLLQIITRWNRKYPTKTIDSITEFNQIYLNDKHPRNALLVEESQPALLGL
AARVATDIINKIDDMKDDPYVFIYGGGAVIIKNSLKMILKQKGRLTNVIFVDNPLFTNAR
GLLVYTCSPKYREHKQKELGFTNLTIS
gi|206973506|ref|ZP_03234424.1|hypothetical protein BCH308197_2702
[Bacillus cereus H3081.97]
(SEQ ID NO: 256)
MSILLKAGADAGNNGLKLMVKGQDPIFIPSIYALYIGEPTGLLDEGDVSLSELENHIDVTI
SSPSLMLNNVRYIVGEKVIQDQLKGTEVEKKSNKSTDELMVITILSGLAVSAMRQSPTSS
HINIRYDLSVALPMQLITQEIAAENAKRYMGNHKVVFHYPNGRDVTINISIEYCKCLPEG
ASGTWGIVYDEEGNVVKHKIECEQNKVSEIDFVDKTLLSFDIGAGTTEEVVSLGVNFRPQ
RSKGLSYGVKETLLQIITRWNRKYPTKTIDSITEFNQIYLNDKHPRNALLVEESQPALLGL
AARVATDIINKIDDMKDDPYVFIYGGGAVIIKNSLKMILKQKGRLTNVIFVDNPLFTNAR
GLLVYTCSPKYREHKQKELGFTNLTIS
gi|196048467|ref|ZP_03115642.1|conserved hypothetical protein [Bacillus
cereus 03BB108]
(SEQ ID NO: 257)
MLLGNPYAIDLGNGFTKRASKKNKSLEADVITELSVLAPVDDYYNEASFTKIELTNTDFP
YYIGEEARKSKLPLIRALGENKAKRYEDPTFKKQLFGFIAKDFKKNVTIPLLVTGLPVSHF
GNQRESIQKVAMEETAVKVNGELITIKVKQCLVIPQPVGTQYYLVKKEIINKEDRILIIDG
GFGTFDVTDMSGNAVIDRLGTELGCEKAFMSIEQIVRDNIGETPDLSVSNMHYILENGYK
YNGSLYDLYTHKDVAEQVDAELQRHFDAALREVSQKFNLAVYDKIVWTGGMAALHK
KRIEKKKEQFPTFAVLENGQEANLLGYYYLGCDVFDKLTKEKASN
gi|168181408|ref|ZP_02616072.1|conserved hypothetical protein
[Clostridium botulinum Bf]
(SEQ ID NO: 258)
MKITVVDLGNINVKYVGENKGRFSSKITNDYQSYEEGFQRVEYNGIKTYIGVGELSREFN
KADRDYMAQLLYSLAKANTADTKEINLTLLLPIIQMKNKTRLIETLKGENFKFKFNGIDR
EIKINDLMVLPEGYASYYSLDIENKKGDVCILDLGSRTINICVLENAKIVKTNTIKLGSFDF
YSKIKSLENAKGEDYIEEDIQRLIDNGLIKVDSKQYIEFLSDILNAVKPYVNLKTYNTIFTG
GTSLMLKEYIEKLPLNKFKVHPNALTSNVDGAMEASKKVWNNGNK
gi|168184423|ref|ZP_02619087.1|precorrin-2 methyltransferase
[Clostridium botulinum Bf]
(SEQ ID NO: 259)
MKNIIAGVDTGFGYGIGMTNDTEVIMKNYINNITEKEALNIANTIKELNNKNTLIKYNGK
YFICGDACIERYPDTMQRLNRDRIKDEYHLIELLSIVGQLTKESEFNLYLCVGLPNRSKGD
SKKFEDWLKGSAFEFSYLCNFGEVKKKVYIKDVTCLPQAYSPIFTLPRNDMNKTIFSVDI
GHSTLDLMLVKNMQTVMASDTLLDGEGCIRIYNNLKQALIRQNEDKKITYYSYSQLQEI
LENGNYSLYGEEQQIENILNRCLEEYAEYVFFTIENNMYKYMPTVDTFIFSGGLLNNNTF
KTILSDKFKQAYKIPLLVQNNRSQYTIAEGLKEYSNIKYADKLEVVKENDIKAAK
gi|168187430|ref|ZP_02622065.1|conserved hypothetical protein
[Clostridium botulinum C str. Eklund]
(SEQ ID NO: 260)
MSKGNNIVDSFSVQVIDDGYADTKSRGEDTNMIVTPSYVTSWRPSYNKDNDLQEEKIDK
LSRIEVKVNGSKYLVGKCAVKQDRNIQWNGASDKHDDTSFDILLKTHLSLLTKKPISRV
KLVMGLPVTASLDKERIEKMKAKVLRQHNLGVRLYGEKEFQNKIVKVEDLIVKAQPHG
TLCDLILDSSGNLTNKDLARKVNAISDIGGKTHNLYLVDALEPLADFCDTKNSGMYIAY
MWIKNYIEQELHLNVSDGQIQYIVASGQIKGYDLTPVIQKAYRSLARKIVLEIRTVWENA
FPFIDNIIFTGGGATILKPYLQEEFKNAMYLTRNQNASGLFKQGIRKWKRKAV
gi|182419552|ref|ZP_02950800.1|hypothetical protein CBY_3706
[Clostridium butyricum 5521]
(SEQ ID NO: 261)
MQNYSISGIDIGHATCSTSNNVLFESKITETEPLNKASKLIIDNKELWLGEGNYDTTYRKV
DKKNYINFLYGALALSTDTVYNYIVLGLPLSQYKEDKAALTNLVLNNNEKSVIINGIQKP
LVIKDVEIYPEGVVTLDDEWEGIVVDIGGRTTDCAMVINERNRRKIINPISLPLGTINFQTD
LIKKINNKYSLDLQVNDAERILKNGLILDGEIIKDDSIEDMYNLFVDKLINQLQVEYSLRT
NFISLTGGGANLFYNSIRKQIGENSVSLQENSIYANSQAFGELGESIWQ
gi|169342450|ref|ZP_02863511.1|putative plasmid partitioning protein
[Clostridium perfringens C str. JGS1495]
(SEQ ID NO: 262)
MILGLDIGNITSIGVGDKEDFITESRLREFEELDDFSGNDIVEINDKKFIFNEGYFENNVVK
HEKENFINLLYYTIAKTLDKENSKENDVKIVIGVPAGQYNSEKERLKKVILNNQCKNIKI
NGESRTINIEDIFIAPEGYGAKVEALQAKKEKVKLLMVDIGGGTSDAALFDENGRFIGGK
SIKVGLLDLYKNVQEVLDLKYKLSVSLEDARKYFDGELDIRNEKFEVENTYKTEALNKL
VKFLINELRGLYPNISQYAICLCGGAAGRILPVFKKVYIQAEAITDIKANAKGFRKVGLA
KWQNQGK
gi|169344353|ref|ZP_02865326.1|StbA protein [Clostridium perfringens C
str. JGS1495]
(SEQ ID NO: 263)
MKILGLDNGYNYTKTSKNICILSTVEKGHDDYNNVLEMNFNGENYIIGEPTGQYIVDAN
KFKTEEGKELLRVTTLAAIGLSYPEESVIDVSIVAGLPVAFYADQKEELTKLIKGLDDSCI
EINKLGKKQIIKIDKVMVLPQACGIIIEKNKKNESSLVIDIGGGTWDIAQFTGLKLVEKAT
YEKGMLVLYSAIAQELNAKYYTKFETSDIQNIIDRKYFTVDGVKKGIEDIEEYIDNYVRKI
AATIKRDFDTTNIDNFYLIGGGAISLESYVKKYFPSIEVEKECQFTNVNSFKFMGELKLK
gi|168205970|ref|ZP_02631975.1|putative plasmid partitioning protein
[Clostridium perfringens E str. JGS1987]
(SEQ ID NO: 264)
MILGLDIGNITSIGVGDKEDFITESRLREFEELDDFSGNDIVEINDKKFIFNEGYFENNVVK
HEKENFINLLYYTIAKTLDKENSKENDVKIVIGVPAGQYNSEKERLKKVILNNQCKNIKI
NGESRTINIEDIFIAPEGYGAKVEALQAKKEKVKLLMVDIGGGTSDVALFDENGRFIGGK
SIKVGLLDLYKNVQEVLDLKYKLSVSLEDARKYFDGELDIRNEKFEVENTYKTEALNKL
VKFLINELRGLYPNISQYAICLCGGAAGRILPVFKKVYIQAEAITDIKANAKGFRKVGLA
KWQNQGK
gi|168206394|ref|ZP_02632399.1|putative ATPase [Clostridium perfringens
E str. JGS1987]
(SEQ ID NO: 265)
MLKLGIDLGNGYTKFKGSKFASKTKVGRLASLAGLGEKPKDIHEVGYKGTTYIVGDGE
VFTSPDRYFGLDYEICLLTAIGLSSKEIVIDANICVGLPIIYFMSETKVLLEKKLNELTEKDS
IKITINGQDKIIKINNARVFAEGAYVLDCMDTDNIITIDLGAGTVNITQWDNLIPISYDTITK
SFNKLYRDIANHIKNTGRGVVTPAYIEANFGEDTITIDGKVVDITDTKQMISKYVSAIVSN
VYDICDVPQANKIQIFGGGAIATEEYWKNAFGKDRDGVSVLPNSQYTNSKIYQKAAEILK
gi|168206979|ref|ZP_02632984.1|conserved hypothetical protein
[Clostridium perfringens E str. JGS1987]
(SEQ ID NO: 266)
MCIYFKVGNDNGNSEHDIIINDKLIAQPNVYSKVRKLPNLDEVNKEYVLEHIEDNLIVTC
EDPSGIYYIGNYALSSGQKIRNVEVGIDNNKLESEVIVINTLAQIAGQAVKEYYLKNKSFG
DIIKVKVDMATALPISSYSNKNAKLFSEKFTNKKHFITVHIGNEVARVEIEFEFVMVIPEG
VTSSFLFIQTDDALKKYNFKKEFFKNAKVLHVAIGEGTVEYPITKGIEFNPNFIKGSNNGV
GHAIDMALDEFKETKGLIKFSRQDYSEVLKNKKHKYNELAEDIIEQYIEEQAEEIFHNAT
KEIQKANNDIDVVCIYGGGSILMRSALEEKFKKFCDRADIKLLYFDKEDCVTLESLGLNV
LVNSKLFKTLKQNSTVKN
gi|168206996|ref|ZP_02633001.1|hypothetical protein AC3_A0270
[Clostridium perfringens E str. JGS1987]
(SEQ ID NO: 267)
MKIIGLDIGNAEVNTSEGVHFPSRVKIGVNNMNKDDIKVNFEGLDFTIGQGSNNIGLNKY
KNINFKISVLVGIAKSFKENDIECNVVIGCPIETFNKNKEIVKDIKGIIESWGKQTIVIEQGE
SKEIKVIDIKNVAIFCESGIVFKNRERFSKEKTLVVDIGGGTRDDSLWNGLDLVECKSND
KMGMINLYETIIKEVNRRNKSNLNFDDAKAMIGKKEYKINQEIVDISYIDIIIENFVTGFM
SEINQIFPFSNVDSIQFVGGGAILLKEYITRLIPKAEVPNNAEFLNAETYREVGELMWS
gi|168207292|ref|ZP_02633297.1|StbA protein [Clostridium perfringens E
str. JGS1987]
(SEQ ID NO: 268)
MKILGLDNGYNYTKTSMGQCILSTVEKGHDDYNNVLEMHLNGKNYIIGEPTGQYIVDA
NKFKTEEGKELVKLTTLAAIGLSYPEESVIDVSIVAGLPVAFYADQKEELTKLIKGLDDSC
IELNKIGKKQIIKINKVMILPQACGIIIEKNKKKESSLVIDIGGGTWDIAQFDGLKLVEKAT
YEKGMLVLYSAIAQELNSKYYTKFETSDIQNIIDRKFFTVEGNKKGIEDIEEYINNYVRKI
AATIKRDFDTTNIDNFYLIGGGAIALESYVKKYFPSIEVEKDCQFTNVNSFAFMGELKLK
gi|168207890|ref|ZP_02633895.1|hypothetical protein AC3_A0731
[Clostridium perfringens E str. JGS1987]
(SEQ ID NO: 269)
MKIAIDLGNRNTKLACKTGDKIKRDIFQARFTNEEQQDYTAAEVVEIDGIKYCIEQGNYD
FEFNKTEKNYLPLLLAAISRATSDNEVEIMMGAPAEHVSGLRDKFKEQLLDKEFIFKYKD
EDRKIKINKLGVIGEGFATYFSIPEEIRNSNTNLGIIDIGGRTINVVTFINGKQHIVCTLNFGI
LDLKNNLLKELKKAGKDYDLNVVENLLLNNRIKIEEKEKEQLINRLINELKIYKIDIDLYT
WVISGGGAEDLGNEILEKYFGENSLMKDPLFTNVLGAYNFMLAKWGV
gi|168211010|ref|ZP_02636635.1|putative ATPase [Clostridium perfringens
B str. ATCC 3626]
(SEQ ID NO: 270)
MLKLGIDLGNGYTKFKGSKFASKTKVGRLASLAGLGEKPKDIHEVGYKGTTYIVGDGE
VFTSPDRYFGLDYEICLLTAIGLSSKDIVIDANICVGLPIIYFMSKTKVLLEKKLNELTEKD
SIKITINGQDKIIKINNARVFAEGAYVLDCMDTDNIITIDLGAGTVNITQWDNLIPISYDTIT
KSFNKLYRDIANHIKNTGRGVVTPAYIEAHFGEDTITIDGKVVDITDTKQMISKYVSAIVS
NVYDICDVPQANKIQIFGGGAIATEEYWKNAFGKDRDGVSVLPNSQYTNSKIYQKAAEI
LK
gi|168214610|ref|ZP_02640235.1|conserved hypothetical protein
[Clostridium perfringens CPE str. F4969]
(SEQ ID NO: 271)
MKVSTLGIDLGNANVKTSKSVIFESKIKPGITKMNENDIKVIYNGAEYTVGAYDGALNIS
KRKYFKTAYKINLLTAIAKSSKANNITTNIVVGVPVESFNDKNLTEEIKKHIESFENEKITV
NGVEKTINIENVEVFCESAIVFADREKFKDKKTLVIDFGGGTIDISFWDGLNLTKARTYRE
GMITLYENVIKQVNNRYSTTLNSNIAIDMIGEDKFTIDQEEKNISFINAIVETYVDGLTSYI
NQYFDVESADSIQLIGCGAIQLEKNIKDEYEKAELHPNAAFANANTYEKVGEILWI
gi|168215366|ref|ZP_02640991.1|StbA protein [Clostridium perfringens
CPE str. F4969]
(SEQ ID NO: 272)
MKILGLDNGYNYTKTNMGQCILSTVERGHDDYNNVLEMNFNGENYIIGEPTGQYIVDA
NKFKTEEGKELVKLTTLAAIGLSYPEESVIDVSIVAGLPVAFYADQKEELTKLIKGLDDSC
IELNKIGKKQIIKINKVMVLPQACGIIIEKNKKKESSLVIDIGGGTWDIAQFDGLKLVEKAT
YEKGMLVLYSAIAQELNSKYYTKFEASDIQNIIDRKFFTVEGNKKGIEDIEEYINSYVRKI
AATIKRDFDTTNIDNFYLIGGGAIALESYVKKYFPSIEVEKNCQFTNVNSFAFMGELKLK
gi|188586962|ref|YP_001918507.1|conserved hypothetical protein
[Natranaerobius thermophilus JW/NM-WN-LF]
(SEQ ID NO: 273)
MVWGSIPDKDRKRRRFSDGISEEDEVISEEEEHHLGGDDAFDRSVKNVGIDLGYGYVKF
IDGKEPKMFPSVVGYGNSQKYKSALQLDLNPLDDLQIKIGDEHFFIGDLAIRQSEVASRS
LGKDRSQDKNARVLMLTALSLLSSWDKQGFNLVTGLPTNFYAAFAEEWESTLNGEFKT
KMKIGGKTQERSFQIEEVTTLPQPFGTLYDQVLNSVGKVVDRDLTDSKIGIVDIGFKTTD
LAVSDGMEFINPLSFSTTTGLSNVNRLVNEKLRHEFKIDREEHQLDDCINSQKIMVAGKS
EDISSWVREALQTVSDKISVEIESKWDYRDFDTLLLTGGGGEMLYPYLKDKFPNLVLVE
DPQTANVRGYQKLANNLFNA
gi|169834565|ref|YP_001693322.1|hypothetical protein CLD_A0083
[Clostridium botulinum B1 str. Okra]
(SEQ ID NO: 274)
MKNIIAGVDTGFGYGIGMTNDTEVKMKNYINNITEKEALNIADTIKELNDENTLIKYNGK
YFICGDACIERYPDTMQRLNRDRIKDEYHLIELLSIVGQLTKESEFNLYLCVGLPNRSKGD
SKKFEDWLKGSAFEFSYLCNFGEVKKKVYIKDVTCLPQAYSPIFTLPRNDMNKTIFSVDI
GHSTLDLMLVKNMQTVMASDTLLDGEGCIRIYNNLKQALIRQNEDKKITYYSYSQLQEI
LENGNYSLYGEEQQIENILNRCLEEYAEYVFFTIENNMYKYMPTVDTFIFSGGLLNNNTF
KTILSDKFKQAYKIPLLVQNNRSQYTIAEGLKEYSNIKYADKLEVVKENDIKVAK
gi|169636508|ref|YP_001716049.1|hypothetical protein pGS18_ORF52
[Geobacillus stearothermophilus]
(SEQ ID NO: 275)
MKLVVANDIGNSETKMIVNDTLIKQPSVVKRLLSKPNVMETNVEKNIANLLDELIVHVT
SNAMKRSGLYFIGKRANMTADKVENMNIKLGNKSKHDIPVLMTLSMLAARSVQLAYQ
ENQELPSSISVDVSMTTAIPASEYSADQARYLEGRFTSNDHVVIVYVGETPVTVTLHFQT
VKVTQEGIPALYALLESENEILKNYNEHYKKQAVPKDFANKRILHVDIGDGTTEYIYTVG
MNPVTDVCSGEKRGVGHATEEATQLLKEEVGGFLNLNRQQFMDIFRDPSHNLHDLAVR
FMQEARYSQAQRILEDIQEKYSDIAGNVDVIAVYGGGSIQFKEELYEELLDFANTVHCEV
LWIPEKYAVDMNVNGLHVINEKILFKQHA
gi|169834805|ref|YP_001715854.1|hypothetical protein CLK_A0227
[Clostridium botulinum A3 str. Loch Maree]
(SEQ ID NO: 276)
MKNIIAGVDTGFGYGIGMTNDTEVKMKNYINNITEKEALNIADTIKELNDENTLIKYNGK
YFICGDACIERYPDTMQRLNRDRIKDEYHLIELLSIVGQLTKESEFNLYLCVGLPNRSKGD
SKKFEDWLKGSSFEFSYLCNFGEVKKKVYIKDVTCLPQAYSPIFTLPRNDMNKTIFSVDI
GHSTLDLMLVKNMQTVMASDTLLDGEGCIRIYNNLKQALIRQNEDKKITYYSYSQLQEI
LENGNYSLYGEEQQIENILNRCLEEYAEYVFFTIENNMYKYMPTVDTFIFSGGLLNNTTF
KTILSDKFKQAYKIPLLVQNNRSQYTIAEGLKEYSNIKYADKLEVVKENDIKAAK
gi|169835030|ref|YP_001715925.1|hypothetical protein CLK_A0298
[Clostridium botulinum A3 str. Loch Maree]
(SEQ ID NO: 277)
MNKYTIAIDLGYGQIKGINQDNKRVIFPSIISSGKDRSLDTFFNSIDNIVDNIHVKILDEYFN
EKEYFVGELAKRQPSNSSFINRDNKINSEENKVLLATALGLLIPNDLPNDTKIHIVTGLPL
EHFIKQKQALNDMLKDFEHTIKFVDHNFSRNIKFEESNITLFPQGAGAIFSKINNDISSLLI
KETFIGLIDVGFKTTDIVVFRINKDKEPVFEQEMSATLDGLGMINIYNTMDKAFTDNSRD
GSKLNTEQLMLLCEEGKIFFKGDYIDLKKDLIKARKTLSTNIINKADGLWGSRKNSFNSI
MIAGGGGKVLYNHLKLIEPNMCQLIDNPEFANAIGYLEFGKQFK
gi|188591469|ref|YP_001796068.1|putative plasmid stability protein,
Actin-like ATPase domain [Cupriavidus taiwanensis]
(SEQ ID NO: 278)
MNTTKTIAVDVGYGNTKFAFPLGADVATRMFLSLAPTRSASSLANHGDGYFQSRDVVH
VTVDGAEYEVGPDVSITSAYGNTGRTLSEDFVTTPEYAALLFGALHYSQARDVGQLILG
LPVHTLQKYAGVLQERFAGTHDFGAGSVSINRVVALPQPLGSLVTFMRQSGKDLDPDD
NCLIVDVGYFTTDWVVARGYMMDDTRSGGVPGGSSRIYQQVAQLLSADEGGEPSGSIE
RIDKSLRDGKLMRYYNKMVDLRPYFEVAKAQCQTAVKEMQTRVGRTEDIAAIVLTGG
GSALYSGAIRAAFPRSHIVAMESPCYANVRGFFDIGSARQARG
gi|171320986|ref|ZP_02909976.1|conserved hypothetical protein
[Burkholderia ambifaria MEX-5]
(SEQ ID NO: 279)
MKTAVFAIDVGYGNTKYAHRAANNAVASGMFPSLAPLAASRSIAGYGDSVLTARKVA
TIVIDQVEYEVGPDVSLTAAYGNTGRALADDYIRTNNYAALLLGAIHFSGVTHIERLVLG
LPVHNLKKYAGALMERFTGTLDFGAGRVKIDKVMVIPQPLGSLVLASSNRKGGFGRDV
EHLVVDVGYFTTDWVYASGFAMDDKRSGGMPGGASQIYQRIAQLIARDQGDAVEDIER
IDKALREQTPFFFYGNDIDLAPYLEKAQPLISGVVKEMQNNVGRLANVRSIILSGGGAAL
YASVIRQAFPRVVIEVIDAPCLANVRGFLLVGESSVARERR
gi|172055064|ref|YP_001806391.1|hypothetical protein cce_4979
[Cyanothece sp. ATCC 51142]
(SEQ ID NO: 280)
MVCIVKKRELKEKEKMADLTMALDFGSSLGRAIYTTSNSYIKPELLLLDPHVVEVPNIAI
ANYEKYKVGNPSPQDSSWVNLNDTYFAVGFLAKRQFSTIHCLNSLKIDSAIPLTLAMVG
AVAEIKGLGTTFSLDLGVLLPWSEFKDKDKLKSVLVSALQSFEYRGQHYHVTLQAFDAL
PEGGGLFARGRVASKGKPMKRVTETNLVVLMIGYRNASILVVERGELTIGLTSDFGFSQ
MITKIKTFTSGQSEDVLIPAICTGKSISDRTLERLARSQRAELREAEKKEIKDAIEDSQQEY
VATLTNWISQQIPPHLEIDEILLGGGTAKYFKRNLTTLLKSYGAQINWSQSLEKRVVQTF
GNEVSKNYLASRLADVYGLFYRLLKKPLPRLKEVVTRESA
gi|182624909|ref|ZP_02952688.1|conserved hypothetical protein
[Clostridium perfringens D str. JGS1721]
(SEQ ID NO: 281)
MCIYFKVGNDNGNSEHDIIINDVLISQPNVYSKVRRLPNLDEVNKQYVIENIENNLIVTCE
DPSGIYYVGNYALSSGQKIRNVEVGIDNNKIESDVILINTLAQIAGQAVKEYYLKNKSFEE
IIKVKVDMATALPISSYSNKNAKLFSEKFTNKKHFITVHIGNEIARVEIEFEFVMVIPEGVT
SSFLFTQTDDILKKYNFKKEFFKDAKVLHVAIGEGTVEYPITKGIEFNPNFIKGSNNGVGH
AIDMALDEFKETKGLIKFSRQDYSEVLKNKKHKYNELAEDIIEQYIEEQAEEIFHNATKEI
QKANNDIDVVCVYGGGSILMRSALEEKFKKFCDRADIKLLYFDNEDCVTLESLGLNVLV
NSKLFKTLKQNSAV
gi|187935818|ref|YP_001893668.1|putative ATPase [Clostridium botulinum
B str. Eklund 17B]
(SEQ ID NO: 282)
MNIGIDLGNGYTKFKGKKFASKVKMGRLANFGEKNKEVHEVKYNNASYVVGEGQFFIT
DDRYFTNEYKICLLTAIALASNEIVIEANICVGLPVMKYMSDVKRRLEDHLNTIGAEKIT
VNGEEKIIHIKSVTVFVESALVVKDRSQGNEITIDIGAGTENIIQWENGVPVNFDTKNKSF
YNLYNKISKYLKDVGKGDVSTEYIEKTLGQDEIIINQELVDIRDTHNIIEQHVRELASKIIS
EFDISRARRIRLMGGGGLPTYKYWKNIIEKVELADNAQFINSEIYETVLEMSGIND
gi|189348522|ref|YP_001941718.1|actin-like ATPase [Burkholderia
multivorans ATCC 17616]
(SEQ ID NO: 283)
MFPSLAPLAASRSIAGYGESVLTARKVATIVIDQVEYEVGPDVSLTAAYGNTGRALADD
YVLSANYAGLLFGAIHFAGVDHIERLVLGLPVHNMKKYSAELKERFTGELNFGAGRVTI
DKVMVIPQPLGSLVLASSNRQGGFGRDVEHLVVDVGYFTTDWVYANGFTMDDKRSGG
MPGGASQIYQRIAALIARDQGDEVEDIERIDKALREQTPFFFYGSNIDLAPYLEMAQPLIS
GVVKEMQNNVGRLANVRSIILSGGGAALYAGVIRRAFPRVVIEVIDAPCLANVRGFLLV
GESSLARERR
gi|193076443|gb|ABO11091.2|hypothetical protein A1S_0642 [Acinetobacter
baumannii ATCC 17978]
(SEQ ID NO: 284)
MKGYKTLTVGVDDGHDGIKIYCGEVGKSFRLPSRVANGRTIIGDTDEVNKQIIHVNGKY
FTVDEFTKEHIDTRTEDYPLSDANVALVHHALHQAFDGQYRKFKIATGLPLNRYYGGK
DKAKNEKLIADKTQNLLINKDFNNPTVYNLYEHDKKNDPLQILNHIVLSEGQCAYFDAL
MDDNGKRSSMYEDLWEGGCAIIDIGGRTTDIAMINPRGGTMQASRCDTLDVGIITLKNK
VSQNLKEFFGLSSNITDWRLSKALKTGIYNHGGKDHDISKILNAAKVEITDQIENSIKVNV
QDGQDLGAVLLVGGGSITLGDELLKRFNYDNWHLVKQPEFANARGMYKCAKYISKL
gi|197286335|ref|YP_002152207.1|plasmid-related protein [Proteus mirabilis HI4320]
(SEQ ID NO: 285)
MFVLGVDIGYSNLKLAIGQSGNEPKTIILPAGAGPADRMPERIGGGDDETCLYVSVDNER
WAAGVPAGRLQGWERELHPEYPTTKTYKALFHAALLMAETESIDLVVTGLPVSQFHEP
QRKSDLVQRLKGVHQVTPKRSITVHDVKVLPQPAGAYMDLVQTGGDLGLIEEGRVVVI
DPGFFSVDWVALEAGEIRYSSSGTSLQAMSVLLETIDKLISEDHGAKVGMDRLEKAMRT
GDLQVLLFGEKVDISPYLNAAMKKVAPVALTAMRQSMRDESINADLVLIAGGGALAYK
EAAKEIFSRSKIIVPEQSVLANVRGFWFYGA
gi|196250808|ref|ZP_03149494.1|conserved hypothetical protein
[Geobacillus sp. G11MC16]
(SEQ ID NO: 286)
MKLVVANDIGNSETKMIVNDTLIKQPSVVKRLLSKPNVTETNVEKNIANLLDELIVHVTS
NAIKRSGLYFIGKRANMTADKVENMNIKLGNKSKHDIPVLMTLSMLAARSVQLAYQEN
QELPPSISVDVSMTTAIPASEYSADQARYLEGRFTSNDHVVIVYVGETPVTVTLHFQTVK
VTQEGIPALYALLESENEILKNYNEHYKKQAVPKDFANKRILHVDIGDGTTEYVYTVGIN
PVTDVCSGEKRGVGHATEEATQLLKEEVGGFLNLNRQQFMDIFRDPSHHLHDLAVRFM
QEARYSQAQRILEDIQEKYSDIAGNVDVIAVYGGGSIQFKEELYEELLDFANTVHCEVL
WIPEKYAVDMNVNGLHVINEKILFKQHA
gi|197261586|ref|YP_002154401.1|hypothetical protein IEBH_gp76
[Bacillus phage IEBH]
(SEQ ID NO: 287)
MLLGNPYAIDLGNGFTKRASKKNKSLEADVITELSVLAPVDDYYNEASFTKIELTNTDFP
YYIGEEARKSKLPLIRALGENKAKRYEDPTFKKQLFGFIAKDFKKNVTIPLLVTGLPVSHF
GNQRESIRKVAMEETAVKVNGELITVKVKECLVIPQPVGTQYYLVKKEIINKEDRILIIDG
GFGTFDVTDMSGNAVIDRLGTELGCEKAFMAIEQIVRDNIGETPDLSVSNMHYILENGY
KYNGSLYDLYTHKDVAEKVDEELQRHFDAALREVSQKFNLAVYDKIVWTGGMAALH
KKRIEKKKEQFPTFAVLENGQEANLLGYYYLGCDVFDKLTKEKAAN
gi|208701891|ref|YP_002267154.1|hypothetical protein BCH308197_B0088
[Bacillus cereus H3081.97]
(SEQ ID NO: 288)
MSNVKEKEDFLREDEELEMLTKAYKMDSAFDVGNANVKAKINGKVLKQPSVIQYLLQ
QPPVTETNLTKLVSNLEDELTVHITSNAIKRSGLYNIGKRATITSDANVENMNIKLGNKY
KHTIPVVMTLGMMACESVKQAFSEESKLPSTINIKSKLSTAIPMSEYTVDKAKFLEDRFT
NNKHIVIVYVGGESVTVSITFEKVKVTKEGVPPLYALIEGEQAILDIYNEQYQEKAVPKD
FVNKKILHADIGDGTTEYVYTVGLNPVPDNCTGERRGVGHATESAIALLKEDTNGRVLL
KRQQYMNILKDPSHRLFDEASRFLENGKYIQAMRILEDIQEKYTEKIAGDADIICVYGGG
SIEFESLLYDDLLEFCEEVNCKLLWIPEKYAVDMNMEGLDILNKKVFFKKG
gi|209523842|ref|ZP_03272395.1|conserved hypothetical protein
[Arthrospira maxima CS-328]
(SEQ ID NO: 289)
MQSNKQPGQSQSQSPLAKATTTTTKPTTTTVVGRSTILSVDLGRTATKSCISRNPADVVF
VPSNVAQMSVEKARGGGFESKNTDPLLDLWLEYQGNGFAVGQLAADFGASLFGVDPA
ANPSKVNDALIKIFACVGYFNLKGDLDVVLGLPFYSQEQFEREKEQIISLLTGPNTLVFRG
EQVVVDIQSVRVMPEGYGSLIWCEAQGSKDAPNFADLSVAVVDVGHQTTDFLTVDRFR
FARGVSQSEVFAMSKFYEEVAAKIEGADAQSLFLLEAVHKPQGQRFYRPRGATKPANL
DEIVPELRKVFARDLCDRVVKWLPERVTDVVITGGGGEFFWQDLQPLLKDAQLRAHLT
QPARKANALGQYVYGEAQLAKR
gi|209972961|ref|YP_002300408.1|gp27.9 [Bacillus phage spO1]
(SEQ ID NO: 290)
MTHISAIDIGFLYTKAIIDGKQVKFKSVVGNGREQNFQNLDFGMNNSEDNITVKTGLDV
NFVSDLAINQSDVVLHSLEADRFSNEVTKQLVLTAFGLGFGSDHVETKIVSGLPVSHYSK
YQEEIKKLFVGDGSYKIHNFDVTSKGYQIKGSAKVVEAEFIPQPFGALLDRILDKDGDIA
DKELAKQTVAVIDPGFGTTDVYVSRSLSPIERLTFSTPTAMNFAYDLIANKIEEQTGISLA
HYKLEKAVSNKYYRVEGKQYDLTAIIQWAFRSASTQLVTEVLNRWKANSKEIDKVLIA
GGTGAAWSKWLKEKFPTAEILEDTQWAVANGYYKWGVRKFG
gi|222530482|ref|YP_002574364.1|hypothetical protein Athe_2523
[Anaerocellum thermophilum DSM 6725]
(SEQ ID NO: 291)
MKCAVDVGFGFTKAVNEKGKEVIFPSAVAKTFLTDIGLKPTSEYFITYMNQTYAVGKA
ATHCMITETSFSDDRFVSEFSKLLILTALMALDSDREIELGLGLPLMLYPKLKEKVRDYF
EFAEEIIVDSNNVAHTYHITRCEVFPQGVGALFSIDSNIEKGIYCVLDIGFRTTDVIVVEVN
ENNINPLLELCFTLDKGMSMAIEKLSIILERKYGVSYDTNLLLDIHERSQISVRGRKINIEE
QKKEVFNTIANDIVQSISRKLQRGFDTFDGVFVAGGGAFNIAAVLQKEFENVQVINNAQ
FANAKGFLNLLSILDE
gi|254478361|ref|ZP_05091740.1|StbA protein [Carboxydibrachium
pacificum DSM 12653]
(SEQ ID NO: 292)
MRRKIDAPIRRFFIFAKKFKGGGVQVFKIGLDLGYGYVKGVNEAGKTVLFPSLVGNAYQ
RNLIGLFWQNLNNLIENMHVVLRNGKEEQEEYFIGDLARREGRNVSYAFDENKINHPNT
KAVLASASALLFPSNDEPVHIVSGLPLEQYIHQKDELREMLKNFKAIVEFKGYNILKIVKF
DRVTVFPQAAGAVYYAIMDDLQKYLIKGSYIGLIDIGYRTTDYIVFVVDGKLSLREDLSG
TLDIGMSQLSNAADKLFTQRTGSKLDIPELIQLVNEGSIFYRGKILNFEKELNEVKLEISRV
IQDRIKAVWGSKLDFFNTIFLAGGGAVSLFDSLKNLYENTVLVKNSQFANAKGFLKVAE
LEEKKERDRE
gi|254478265|ref|ZP_05091646.1|hypothetical protein CDSM653_706
[Carboxydibrachium pacificum DSM 12653]
(SEQ ID NO: 293)
MFKIGLDLGYGYVKGVNEAGKTVVFPSLIGNAYERNLKILFENGFERKIDNMHLIIMNG
QKQEYFVGELARRESRNVSYAFDEDKINHPNTKALIAASCLLLFPEDGRPVHLVTGLPLE
QYIHKKEEFKEMLKDYKTIACFKGDERVKGIKFDKITIFPQAAGAVYFAVMEDLHRYLV
KGSYLGLVDIGFKTTDFIVFLVEDRLVLREDLSGTIDLGISAVYNAADKLFTQKTGSKLD
VPELMRLTADGKIFFKGKQLNFTEELKNIKAETARVIKDRLKAVWGNKLDFFNTVFLAG
GGSKDLQEFLNDIYENTVIVKDPQLANARGFLKVAELEEKKTNTKEG
gi|218289513|ref|ZP_03493741.1|hypothetical protein AaLAA1DRAFT_1327
[Alicyclobacillus acidocaldarius LAA1]
(SEQ ID NO: 294)
MLTIGLDVGNGSIGLCVRDGDTLVQDTMPSVYGRVDLTRRVLSVPGRSASREVDVFTFG
GEHFVLGYQNVHVMHSTPIGAYDREQRYASRQLETLAKLALLDAATRTGRTGVIEVAV
ACGTPSEDFTTRTVEIMQRWFSEPVTGAKNGEQVVVMIKRLEVIPQPFAVFLDAYLDQD
GLVVDEELEKQDVLVIDSGSGTLDLSEIHRLELTRQTSIPAGLNDVYQLILEEIRREEPKV
YATAYDLEAQLRAQDGAQEFWFEYGALRMNITELRERAMRQVWDRMQQGIQYAYPD
RSSFGRVILAGGSGEAFRNYFLAWMPSIRIAPEPQLAVARGLYKYALAQGAEES
gi|218665896|ref|YP_002425759.1|hypothetical protein AFE_1323
[Acidithiobacillus ferrooxidans ATCC 23270]
(SEQ ID NO: 295)
MTCLGMDVGHSSVKLSWRCPDGKVVKLMIPSVVIPAMRITDKTAADTALDDTVDVAG
NTYFIGNTALHEVGNLRVSGLHDRWLDMKEFRALVQGAIDKVTRNAGKIERIVTGLPAS
TFHEQQLKMRNIVSACLDTQIRVLPEPNGIYLQHMIGLEGGVRKDRVVNAGIVAIGRYTT
DFMALLDGRWVEGVAGSCSGMSRAANLLLKQLKNEGLDVDYLDADDALWKREIRNY
GKTVDVSRDADRALSILGSEIFDSASARFGDVGRKLEKIFVGGGGADLLIGELTEYWPQA
ELVEDPRFAVAEGFRRLGESL
gi|219857308|ref|YP_002474153.1|putative StbA-like protein
[Lactobacillus gasseri]
(SEQ ID NO: 296)
MDIFSLDLGNKQTKLKSSKAEYVLPSRYLNQADMPMSVGNSTMNNDLHTYSVPFSDDK
YVWGRDIDRLHLDEYLADTIMYGARYDSEAFKLLANFALGLLASDFKAAKDQVLEVV
VTAGLPTGDYANQGQLKALLKVLEGQHQATIDDKIVTVRVRKVYILPQPIGTLYNELLD
DEGFIQNKDLLDEKVGIVDVGGGTILIDTILNFELSGKNRHQFNTGVNDLYEAIANGING
DTSLYQLEKDLRKGNQQHHWSYRFSKNRQDDITDLVCKEIDRFTRRLVANVTSTLKNL
NSIDTLFFTGGGANLLNQKILNTTFTNAVIVENTEVANVNGFYKYGLSQQAQEEGSK
gi|222096627|ref|YP_002530684.1|hypothetical protein BCQ_2967 [Bacillus
cereus Q1]
(SEQ ID NO: 297)
MKSLYAIDVGIGFTKRAYRQDVDSEVTIKSEASTLAPVPNHDESEDLTKVSFIDLDFAYY
MGNEAHQSDASLLPPFDEEIENYYESERFKQQIFGCIAKDYKENVVLPLVVTGLPVTYFG
SQHEQLQRALKKETSVQIDGKFITITVENALILQQPVALHAYFLKEGIIQERDRILIIDGGF
RTLEMTDMKQNVILNHYETELGCSKPLKNIKNIVQNHAGESNQLHINDMPNILEKGYGG
REEDTQTSQVHTLIQKELDAHFQDVMRVLQEQFKLDQYDTIIWTGGIVDLHKKRIEKMQ
GEISSFRMVDASKEAALHGYYMIGSQVFDDITNQSVYESKL
gi|221316931|ref|YP_002533075.1|hypothetical protein BCQ_PT09 [Bacillus
cereus Q1]
(SEQ ID NO: 298)
MTKVFAIDHGNGAVKMRTDVFKKTLPAIYSFSSNVGEALSGGKMKLKTYKVEGTEYV
WGDDIIKVSNTLNTYAQQNRYKTNQYKTLSKIALAEMAAKTNVKSYDEILVITGVPSQE
IGTKAVDEIKEVYQGTHEVEVNGKKVIINVVDVIVLAQPVGTVMSRYLDEDGFVADDSY
EDMTVGIIDIGTGTTDLDVISMLRREKESTSVPKGMHDVYEPIVAKIKKETSATINDYKLE
KVFEEGAYQASKRMDPIDFNDEKTASIKEVYDFIVNGVNNAWKTFDRFDEVLVSGGGA
NTFHELLEEWIGKVTKLEESQTANVEGFYRYGKFEVGEEDGE
gi|224369200|ref|YP_002603364.1|hypothetical protein HRM2_21020
[Desulfobacterium autotrophicum HRM2]
(SEQ ID NO: 299)
MEVVGIDVGFGFTKAFNGKNSVVFKSVLGDSTQIQFRSSLGDDQDNSNLHVTLDGKSYF
IGSYAEQQSNVKEFTLDQDKLLTDFVKVLALTAIGVCCENNASLNVVSGLPVGFLTRDY
KRFADLLTGRHEIIFHYENKDDITRRIHINKIQMIPQPIGSIFNLLMDDRGKITDRKLSGQKI
GVVDIGFKTTDFSIFDHLQYIERSSTTMDTGISKCFSLIANKLRQESGVNIELYRMFSFIES
GAIKIRGREYNIANLKKRVYAHAAAAIAADVNRLWEEDWDMDSIILSGGGSMELAPFLR
SLIQGNVIPIANDVDTRLNNVQGYLKFGRHKWGYTETPVSDLPDNKETTTETNKDTALE
SDQNSGETKGRGWLKGSRT
gi|242309769|ref|ZP_04808924.1|conserved hypothetical protein
[Helicobacter pullorum MIT 98-5489]
(SEQ ID NO: 300)
MDAQRIAIDIGYGDTKVMANGKLFKFPSAISQVGESMLQLDFKSDNPIFEGIEYRVGSKA
LMEAVATRGYLFLKRYSPLLIHNALLEAKFDLEAPIEIATGLSIVNNLEAQNFLEIISNFTI
NQIQIKPRVFLFAQGQGLYYQSGLDKEDRACVIDIGYNTLDFLVFENGKPRVDLCFANK
KGANLAITNLQKFLIKEFRVDFNEQEAKEVFVKKEIEIAGKKIDFSDVINSIMQRYVRTIT
DEVFSKAEDILSKTKNIVIGGGGAYFLKKEYLEDLHKANYLFLDNPEYSNVLGYYKSAF
KTKGV
gi|239629235|ref|ZP_04672266.1|conserved hypothetical protein
[Lactobacillus paracasei sub sp. paracasei 8700:2]
(SEQ ID NO: 301)
MDIFSLDLGNKQTKLKSSKAEYVLPSRYLNQADMPMSVGNSTMNNDLHTYSVPFSDDK
YVWGRDIDGLHLDEYLADTIMYGARYDSEAFKLLANFALGLLASDFKAAKDQVLEVV
VTAGLPTGDYADQGQLKALLKVLEGQHQVTIDDKIVTVRVRKVYILPQPIGTLYNELLD
DEGFIQNKDLLDEKVGIVDVGGGTILIDTILNFELSGKNRHQFNTGVNDLYEAIANGING
DTSLYQLEKDLRKGNQQHHWSYRFSKNRQDDITDLVCKEIDRFTRRLVANVTSTLKNL
DSIDTLFFTGGGANLLNQKILNTTFTNAVIVKNTEVANVNGFYKYGLSQQAQNEGSK
gi|225522260|ref|ZP_03769065.1|conserved hypothetical protein [‘Nostoc
azollae’ 0708]
(SEQ ID NO: 302)
MTDQPPVANPMNAAAIPMNRVAPTPINNNVNKPVSVSGKNILSVDLGRTSTKTCVNREP
ANVAFIPANVKQMSIEQIRGGVFESKATDPLMDLWMEYQGNGYAVGQLAADFGANLG
VGQSKVEDALAKVLVAAGYFKLKDEISVIVGLPFLSLEQFEREKAQLMSLISGPHVMNF
RGETVSLNVTKVWVMPEGYGSLLWCETQPNKGSSMPDLTKVSVGIVDIGHQTIDLLMV
DNFRFARGASKSEDFGMSKFYEMVAKEIEGADSQSLALISAVNKPKGDRFYRPKGASKP
ANLDDFLPNLTEQFSREICSIVLAWLPERVTDVIITGGGGEFFWEDVQRLLKEAKIHAHL
AAPSRQANALGQYIYGEAQLSAVRAAR
gi|225174710|ref|ZP_03728708.1|hypothetical protein DealDRAFT_0563
[Dethiobacter alkaliphilus AHT 1]
(SEQ ID NO: 303)
MKESVVGIDLGFGWTKAGHNGQFFRCPSVVGEAVNLFESPTGIENNIQLWYNDQHYFV
GELAIRQATIKYFSMAANKARSDISAILAATALAALKPGRVNIVTGLPVDFYFQYKDDLD
NQLQHLPNRVRIQMDNKTYNCALEVQQTKIVPQPLGSAMSLILDSRGNTIDHRLASKNIL
VVDVGFHTLDILALSALEIIRPFSFTRPLGMAVAYKGISQDLGGLPLYDVDRLFIKNQLQ
NHTAAFQSLARQITEEIAGLNQKFDHYLITGGGGAQLYNWLLPGFERILVPDAQQANVV
GYQKLGAKTWSKRNIS
gi|225685364|ref|YP_002729796.1|hypothetical protein PERMA_A0068
[Persephonella marina EX-H1]
(SEQ ID NO: 304)
MKVAFDLGFGWTKVCTDTGECFKFPTWLAYHSDTAISEVDKVLVDGKEYVVGEDARL
ERQRITITSIQELLNYFPVFKRYSLEKLGISESEAQIITGLPPIHKDKAEILEKQGAVVLPQG
LGIFLDVADKVSEEELMIIDIGFNTVDYIVVIKNKRKKGNTIEKQGVERMIELFRNKLPDS
LGYLKQFSFQRLMDVFEKGYATVEGERIDLTSYKERAIEEYNEVLKTRLKDEIGNLIDEIE
RIVIAGGGAYYLKDIRKAGIYIPEKPEFSQARGYLKYE
gi|255103000|ref|ZP_05331977.1|putative ATPase of HSP70 class
[Clostridium difficile QCD-63q42]
(SEQ ID NO: 305)
MSKLGIDIGNYAVKTSTDDIFESKVTEVKNFGSDSDSIKIGNKTYYLGEGDEEINIVKYEK
ENFLPLLLGAICRNTDDEVIDLALGLPVKQFGGLRKDLIEKLQGKEYHVEFEKGNETTKR
DITIRSVQVFPEGVTGYLYYAKDIVDQIAGRDVVLVDIGGKTTDIALVQGNKATDPYSV
NVGTINIYDAIKKSLEMDERFLGKVEIKREKIQDYIDKGFYLNGEKQDIKKNIDASVGLF
KQIYNELKLNYPISTSAVVVMGGGAKLLGEAFKKNIPGIIVMSDVDKHVFANAKGYKK
MMK
gi|255652545|ref|ZP_05399447.1|ATPase of HSP70 class [Clostridium
difficile QCD-37x79]
(SEQ ID NO: 306)
MKKEKVKVAVDLGNSMLNSAAYIEKELILKKLPNKLQFEKTISPKARVMKKDGKVIYL
GVGDLNNNVLKHTRKNLLEQVLVMIHEIFPDEDNLSVELITGLPPTQMFNEKYLKLFQDI
FIQPGEIKITIDGKQKTFEILNVDVKAEGYSGFISLVDKITTKQNILGIDVGGSTTDLCNYE
YDYEDDMYYPNVTDTIEKGIIDFETAIANKFNSKNGADIKISQIDVILRNDIDVIEYEGSKY
KLDDYIDAMYPIIDDMINKITNKFGQLDGYYVVGIGGGYKTFNKYANQFISKQLEVDDD
SRFYANVIGYLEQ
gi|225865091|ref|YP_002750469.1|hypothetical protein BCA_3199 [Bacillus
cereus 03BB102]
(SEQ ID NO: 307)
MKSLYAIDVGIGFTKRAYRQGEDSEVTVKSEASTLAPVPNHDESEDLTKVSFIDLDFAYY
MGNEAHQSNASFLPPFEEEIENYYESEQFKQQIFGCIAKDYKENVVLPLVVTGLPVTYFG
SQHEQLQRALKKETSVQIDGKFIHITVENALILQQPVALHAYFLKEGIIQERDRILIIDGGF
RTLEMTDMKQNVILNHYETELGCSKPLKNIKNIVQNHAGESDHLHINDMPNILEKGYGG
REENPQASQVDTLIQKELDTHFQDVMCVLQEQFKLDQYDTIIWTGGIVDIHKKRIEKMQ
GEISSFRMVDASKEAALHGYYMIGSQVFDDITNQSVYESKL
gi|237728307|ref|ZP_04558788.1|rod shape determination protein
[Citrobacter sp. 30_2]
(SEQ ID NO: 308)
MSNDKLVVCGIDIGYSNVKIAVGDPADDKPTVSIYPAYATNEAVEDVRLVKRNCEHEVL
VYPGGKEWRAFTERPDARELHDRYHMTEMYLALYLASLDKIAAKSGNDIDLVVTGLPV
RLANDSERAKLTARLTGTFTIAPGKTVTVKKCLVLQQGVGVINDIVNRPGLISQEELEKA
TILVVDPGFFSMDYIAFKSGSRVSGSSGSSLKATSAIIESIVNRLNAVNPEERIDDLPEIIEIA
LRNNEPSFFNGFRHIPLRPLLEEAIPSIASDVVKELRKSTRVLGPVHIIAAAGGGTGFYEQT
IREEFPRARIVSSPLPVASNAIGFWNYGVDLMLYGDD
gi|227522276|ref|ZP_03952325.1|conserved hypothetical protein
[Lactobacillus gasseri JV-V03]
(SEQ ID NO: 309)
MEIFSLDLGNKQTKLKSSKSEYVLPSRYLNQADMPMSVGSSTTNNDLHIYSVPFSDDKY
VWGRDIDGLHLDEYLADTIMYGDRYNSEAFKLLANFALGLLASDFKIANNQVLEVVVT
AGLPTGDYADHERLKSLLKVLEGQHQVTIDDQIVTVRVRKVYILPQPIGTLYNELLDSQG
FIKNKALLDEKVGIVDVGGGTILIDTILNFELSGKNRQQFNTGVNDLYEAIASRIEGDVSL
YQLEKELRHGNQQHQWSYRFSKNRQDDITELVGKESNRFTRRLVANVTSTLKNLDSIDT
LFFTGGGANLINQKILKTTFTNAVIVKDTEVANVNGFYKYGLSQQAQDKEGK
gi|227893739|ref|ZP_04011544.1|conserved hypothetical protein
[Lactobacillus ultunensis DSM 16047]
(SEQ ID NO: 310)
MEIFSLDLGNKQTKLKSSKSEYVLPSRYLNQADMPMSVGSSATNNDLHTYSVPFSDDKY
VWGRGIDGLHLDEYLADTIMYGDRYNSEAFKLLANFALGLLASDFKIANNQVLEVVVT
AGLPTGDYADHERLKSLLKVLEGQHQVTIDDQIVTVRVRKVYILPQPIGTLYNELLDSQG
FIKNKALLDEKVGIVDVGGGTILIDTILNFELSGKNRQQFNTGVNDLYEAIASRIEGDVSL
YQLEKELRHGNQQHQWSYRFSKNRQDDITELVGKESDRFTRRLVANVTSTLKNLDSIDT
LFFTGGGANLINQKILKTTFTNAAIVKDTEVANVNGFYKYGLSQQAQEKEGK
gi|291286593|ref|YP_003503409.1|MreB-like ATPase involved in cell
division [Denitrovibrio acetiphilus DSM 12809]
(SEQ ID NO: 311)
MIGIDVGYGDVKAVYVEDGELKYFKLPTAVAYAPSNSIDIIDSAEVVYSFQGREYIVGES
ARFGAFSTRSFDFLKRYSPLFIHHTLKVLKIEPTHVATGLPLGLFNRKDEMTKELITAQVD
GNTIKAEFSMFPQAVGILLDYRMDDAGKVKADTAKNGIVLDIGFNTIDVLCFEKGTAIRS
DAKTLDKFGISKIVLELVELINREHGIQLSDQEAKDVFLAGQMNVYGSRIDLTEAIRNITE
MYFDEVMHNIRSLWDKRLQRADLLLLAGGGAVTIAKYVPSEYAKIVKVPERSEFANAR
GYFKALMAKQEQALKAD
gi|291286482|ref|YP_003503298.1|MreB-like ATPase involved in cell
division [Denitrovibrio acetiphilus DSM 12809]
(SEQ ID NO: 312)
MIGIDVGYGDVKAVYMDVGELKYFKLPTAVAYAPMNSIDIADEAEERYSFQGREYIVG
ESARFGAFSTRSFDFLKKYAPLFIHHTLKVLRLVPSYVATGLPLGLFNRKDEMTKELTTA
QVDGNTIKAEFSMFPQAVGILLDYRMDDAGKVKADTAKNGIVSDIGFNTIDVLCFEKGT
AIRSDAKTLDKFGISKIVLELVELINREHGIQLSDQEAKDVFLAGRMNVYGNKIDLTEAIR
NITEMYFDEVMHNIRSLWDKRLQRADLLLLAGGGAVTIAKYVPSEYAKIVKVPERSEFA
NARGYLKALMAKQEQALKADK
gi|227892254|ref|ZP_04010059.1|conserved hypothetical protein
[Lactobacillus salivarius ATCC 11741]
(SEQ ID NO: 313)
MSKNNVVKMNVANDLGYGSVKAKVNDTKIHFPSVLALQREQDIAKPVEFDSEKEKLSY
LSDMINHMDITVSSSAVKTQGRFLLGTAAVKSSLPMRAFDVNDFTGKSDNDLSIILTLG
MIAAQRVALAVENGEDLSEQLNAEVNMTTALPVSEGKKNGIVDSYINKYVNSKHTVVF
HNLKDPITVSLTFNKVYVALEGEVAQLYIQNSDIKLKGLIKKDFAKNYPELATEIEVTDL
VKIKNLLGIDIGEGTTDLVVIKDGKANAVSSTSLPTGYGNALQDAIDVLQTQNMNFEAR
SQLQDYLSQDVSPLAKRMQNKVRQTVFEQLAPFADKIVEAASKTMRKAGANVEVLYV
YGGGSIPMLEQTELRQKLAQKMKDFSGGIDVPVIWIDKSYAQILNEKGLELVLNVLK
gi|227892068|ref|ZP_04009873.1|conserved hypothetical protein
[Lactobacillus salivarius ATCC 11741]
(SEQ ID NO: 314)
MEIFSLDLGNKQTKLKSSKNEYVLPSQILNGEDMPQQLSDFGKKRDINYFKVPFDDSEWI
WGKDLSTLKRDDYLQDTLMHQNRYSNDTFKLLANFALGLLATDFEKAVENILEVTVVT
GLPTDDYNSQKQLKDLSSILKGQHQIEVDGVTYTVRVKHVLIIPQPVGTFYDVLLDDEG
VLVNDELLEEKVGIVDAGGGTILIDTLLNFELDKRNRRQYATGANDLYEAIMSQMDGN
VSLYQIEKMVRNGIKERKFSYRYSKNHIEDVTDLVEKEITNFTRRLVSNLKSTFKDIDSID
TLIITGGSANLINQRLIVDFFETAYFVKDSELANVRGFYKYALTAE
gi|258510592|ref|YP_003184026.1|hypothetical protein Aaci_0589
[Alicyclobacillus acidocaldarius subsp. acidocaldarius DSM 446]
(SEQ ID NO: 315)
MIVGLDVGFGHLKWTTDGHTVHRMPAVAAPTWTEPDVVSGDHAWVVGEHAEREDAT
LAVALDHERLSRPEFQALLGYVFATLPDEPLQVVSGLPYSATEEEQANYERQLREIVGPY
QVGERVWKGPVPSVTLFRQAQAALIDALFDERNRPRRPELLQEGLRIALIDVGYKTTDV
VVAVLFPAYQIVREMSLSLDVGVHNVEAMLQRAYQRAYGAEMLDRERMRLALDGKRI
YRFGQPVTLPVDEARRQVAERIRAGVVQHWGRAISTVARVFLAGGGAALLGAYLAQPP
LVAEMVPDPQGANARGFYKLGRFAETA
gi|257793030|ref|YP_003186429.1|hypothetical protein Aaci_3037
[Alicyclobacillus acidocaldarius subsp. acidocaldarius DSM 446]
(SEQ ID NO: 316)
MLTIGLDVGNGSIGLCVRDGDTLVQDTTPSVYGRVDPTRQVLSVPGKSAPRKVDVFTFG
GEHFVLGYKNVHAMHSTPIGAYDREQRYASRQFETLAKLALLDAATRTGRTGVIEVVV
ACGTPSEDFTTRTVEIMQRWFSEPVTGAKNGEQVVVMIKRLEVIPQPFGVFLDAYLDQD
GLVVDEELEKQDVLVIDSGSGTLDLSEIHRLELTRQTSIPAGLNDVYQLILEEIRREEPKV
YATAYDLEAQLRAQDGAQEFWFEYGALRMNITNLRERAMRQVWDRMQQGIQYAYPD
RSSFGRVILAGGSGEAFRNYFLAWMPSIRIAPEPQLAVARGLYKYALAQGAEES
gi|258511177|ref|YP_003184611.1|hypothetical protein Aaci_1191
[Alicyclobacillus acidocaldarius subsp. acidocaldarius DSM 446]
(SEQ ID NO: 317)
MVIGVDLGYGWVKATNGERSNRFPALVGEAHELLLSDLFGVPEYDVHIETPFGSRRVFV
GELARQESQAAWNLATKKFEDTDTEALWLTALALFARDGEPLDVVTGLPLAHYEAQR
AALRERLLSLRGRVTIQGRIVEVEARSVRVIPQAMGAMIASLLDPATLELRNPAWTEHG
GYLLLVDVGTRTTGFVTFETQPELRLMNRLSDSVDVGVHDLYVALASVFRQRTGETPPL
SDGLYDELYARGEVFYGGHTVSVEPERSRHIERMGGLIVRRIQEHLGAEALKRVHTVFV
AGGGYRIVQTTLQRMFPRVVVVPNPQMANAEGYRLYGLTRAGSGR
gi|229199704|ref|ZP_04326345.1|hypothetical protein bcere0001_51830
[Bacillus cereus m1293]
(SEQ ID NO: 318)
MKSLYAIDVGIGFTKRAYRQDVDSEVTIKSEASTLAPVPNHDESEDLTKVSFIDLDFAYY
MGNEAHQSDASLLPPFDEEIENYYESERFKQQIFGCIAKDYKENVVLPLVVTGLPVTYFG
SQHEQLQRALKKETSVQIDGKFITITVENALILQQPVALHAYFLKEGIIQEQDRILIIDGGF
RTLEMTDMKQNVILNHYETELGCSKPLKNIKNIVQNHAGESNQLHINDMPNILEKGYGG
REEDPQTSQVHTLIQKELDAHFQDVMRVLQEQFKLDQYDTIIWTGGIVDLHKKRIEKIQG
EISSFRMVDASKEAALHGYYMIGSQVFDDITNQSVYESKL
gi|229191241|ref|ZP_04318229.1|hypothetical protein bcere0002_29060
[Bacillus cereus ATCC 10876]
(SEQ ID NO: 319)
MKSLYAIDVGIGFTKRAYRQDVDSEVTIKSEAATLAPVPNHAESEDLTKVSFIDLDFAYY
MGNEAHQSDASFLPPFEEEIENYYESEEFKQQIFGCIAKDYKENVVLPLVVTGLPVTCFG
SQHEQLQCALKKETSVQIDGKFINITVENALILQQPIALHAYFLKEGIIQEQDRILIIDGGFR
TLEMTDMKQNLILNHYETELGCSKPLKNIKNILQNHAGESNQLHINDMPKILEKGYGDK
EENYETSQVDILIQKELDTHFQDIMRVLQEQFKLDQYDTIIWTGGIVDLHKKQIEKMQGE
IVSFRMVDASKEAALHGYYIIGSQVFEDITNQSAYKSKL
gi|229187864|ref|ZP_04314983.1|hypothetical protein bcere0004_53870
[Bacillus cereus BGSC 6E1]
(SEQ ID NO: 320)
MLLGNPYAIDLGNGFTKRASKKNKSLEADVITELSVLAPVDDYYNEASFTKIELTNTDFP
YYIGEEARKSKLPLIRALGENKAKRYEDPTFKKQLFGFIAKDFKKNVTIPLLVTGLPVSHF
GNQRESIRKVAMEETAVKVNGELITVKVKECLVIPQPVGTQYYLVKKEIINKEDRILIIDG
GFGTFDVTDMSGNAVIDRLGTELGCEKAFMAIEQIVRDNIGETPDLSVSNMHYILENGY
KYNGSLYDLYTHKDVAEKVDEELQRHFDAALREVSQKFNLAVYDKIVWTGGMAALH
KKRIEKKKEQFPTFAVLENGQEANLLGYYYLGCDVFDKLTKEKASN
gi|229179428|ref|ZP_04306781.1|hypothetical protein bcere0005_27770
[Bacillus cereus 172560W]
(SEQ ID NO: 321)
MKSLYAIDVGIGFTKRAYRQDVDSEVTIKSEAATLAPVPNHAESEDLTKVSFIDLDFAYY
MGNEAHQSDASFLPPFDEEIENYYESEEFKQQIFGCIAKDYKENVVLPLVVTGLPVTCFG
SQHEQLQRALKKETSVQIDGKFINITVENALILQQPIALHAYFLKEGIIQEQDRILIIDGGFR
TLEMTDMKQNVILNHYETELGCSKPLKNIKNILQNHAGESNQLHINDMPKILEKGYGDK
EENYETSQVDILIQKELDTHFQDIMRVLQEQFKLDQYDTIIWTGGIVDLHKKQIEKMQGE
IVSFRMVDASKEAALHGYYIIGSQVFEDITNQSAYKSKL
gi|229173780|ref|ZP_04301321.1|hypothetical protein bcere0006_28790
[Bacillus cereus MM3]
(SEQ ID NO: 322)
MKSLYAIDVGIGFTKRAYRQDVDSEVTIKSEASTLAPVPNHAESEDLTKVSFIDLEFAYY
MGNEAHQSDASFLPPFDEEIESYYESEQFKQQIFGCIAKDYKENVVLPLVVTGLPVTYFG
SQHEQLQNVLKKETSVQIDGKFINITVENVLILQQPVALHAYFLKEGIIQEQDRILTIDGGF
RTLEITDMKQNVILNHYETELGCSKPLKNIKNILQNHAGESDDLHINDMPKILEKGYGGR
EENHQTSQVDTLIQKELDTHFQDVMRVLQEQFKLDQYDTIIWTGGIVDIHKKRIEKMQG
EISSFRMVDASKEAALHGYYIIGSQVFEDITNQSAYESKL
gi|229173396|ref|ZP_04300940.1|hypothetical protein bcere0006_24970
[Bacillus cereus MM3]
(SEQ ID NO: 323)
MSILLKAGADAGNNGLKLMVKGQDPIFIPSIYSLYIGEPTGLLDESDVSLSELENHIDVTIS
SPSLMLNNVRYIVGEKVIQDQLKGTEVEKKSNKSTDELMVITILSGLAVSAMRQSPTSGH
INIRYDLSVALPMQLITQEIAAENAKRYMGNHKVVFHYPNGRDVTINISIEYCKCLPEGA
SGTWGIVYDEEGNVVKHKIECEQNQVSEIDFVDKTLLSFDIGAGTTEEVVSLGVNFRPQL
SKGLSYGVKETLLQIITRWNRKYPTKTIDSITEFNQIYLHEKHPRNALLVEESQPALLGLA
ARVATDIINKIDDMKDDPYVFIYGGGAVIIKNSLKMILKQKGRLTNVIFVDNPLFTNARG
LLVYTCSPKYREHKQKELGFTNLTIS
gi|229168012|ref|ZP_04295742.1|hypothetical protein bcere0007_29710
[Bacillus cereus AH621]
(SEQ ID NO: 324)
MKINMMNKDSGNSLDMNLIDGFYIETPTNVVEISKDEADSHFVATITNPKELLSRLLISTT
IPGEDTERFFLVGDEAAKHALANNHVNKLHDKITSPIPYVMFLSAISFYHAINEQRESDD
NTIEIEYFQTMLPIWLLKRTAKFSEAQNAMAERFAGEHEVTIHTPGMEKTLKITVEKATC
RIEGEIARLAIKKNFELEDREEASQFDNNDTVLVDIGGGTIDLVLSPVGLKSPKNRDSMQP
IDKLSYLSHIEKLRKEKFLEKFSDLRSFETFIVNNFQKPKMELVDGNTGQRVDLTDKVRS
SLKEFAKFLILKIQDVMPAPADKVYKYVYFGGVAPILEASIHEVIEEMYGAEIAQANHIFL
PDSRKLNLYGLEVKSRGEMLQKTEK
gi|229161622|ref|ZP_04289602.1|hypothetical protein bcere0009_24080
[Bacillus cereus R309803]
(SEQ ID NO: 325)
MSILLKAGADAGNNGLKLMVKGQDPVFIPSIYSLYIGEPTGLLDEGDVSLSELENHIDVTI
SSPSLMLNNVRYIVGEKVIQDQLKGTEVEKKSNKSTDELMVITILSGLAVSAMRQSPTSS
HINIRYDLSVALPMQLITQEIAAENAKRYMGNHKVVFHYPNGRDVTINISIEYCKCLPEG
ASGTWGIVYDEEGNVVKHKIECEQNQVSEIDFVDKTLLSFDIGAGTTEEVVSLGVNFRPQ
LSKGLSYGVKETLLQIITRWNRKYPTKTIDSITEFNQIYLNEKHPRNALLVEESQPALLGL
AARVATDIINKIDDMKDDPYVFIYGGGAVIIKNSLKMILKQKGRLTNVIFVDNPLFTNAR
GLLVYTCSPKYREHKQKELGFTNLTIS
gi|229156745|ref|ZP_04284832.1|hypothetical protein bcere0010_29300
[Bacillus cereus ATCC 4342]
(SEQ ID NO: 326)
MKSLYAIDVGIGFTKRAYRQDVDSEVTIKSEASTLAPIPNHAESEDLTKVSFIDLDFAYY
MGNEAHQSDASFLPPFDEEIENYYESEQFKQQIFGCIAKDYKENVVLPLVVTGLPVTCFG
SQHEQLQRALKKETSVQIDGKFITITVENVLILQQPVALHAYFLKEGIIQEQDRILIIDGGF
RTLEMTDMKQNVILNHYETELGCSKPLKNIKNILQNHAGESGHLHINDMPKILEKGYGG
REENHQTSQVDTLIQKELDTHFQDVMRVLQEQFKLDQYDTIIWTGGIVDIHKKRIEKIQG
EISSFRMVDASKEAALHGYYMIGSQVFDDITNQSVYESKL
gi|229156322|ref|ZP_04284418.1|hypothetical protein bcere0010_25110
[Bacillus cereus ATCC 4342]
(SEQ ID NO: 327)
MSILLKAGADAGNNGLKLMVKGQEPVFIPSIYALYIGEPTGLLDEVDVSLSELENHIDVTI
SSPSLMLNNVRYIVGEKVIQDQLKGTEVEKKSNKSTDELMVITILSGLAVSAMRQSPTSS
HINIRYDLSVALPMQLITQEIAAENAKRYMGNHKVVFHYPNGRDVTINISIEYCKCLPEG
ASGTWGIVYDEEGNVVKHKIECEQNKVSEIDFVDKTLLSFDIGAGTTEEVVSLGVNFRPQ
LSKGLSYGVKETLLQIITRWNRKYPTKTIDSITEFNQIYLNDKHPRNALLVEESQPALLGL
AARVATDIINKIDDMKDDPYVFIYGGGAVIIKNSLKMILKQKGRLTNVIFVDNPLFTNAR
GLLVYTCSPKYREHKQKELGFTNLTIS
gi|229151340|ref|ZP_04279544.1|hypothetical protein bcere0011_28860
[Bacillus cereus m1550]
(SEQ ID NO: 328)
MKSLYAIDVGIGFTKRAYRQDVDSEVTIKSEAATLAPVPNHAESEDLTKVSFIDLDFAYY
MGNEAHQSDASFLPPFEEEIENYYESEEFKQQIFGCIAKDYKENVVLPLVVTGLPVTCFG
SQHEQLQHALKKETSVQIDGKFINITVENALILQQPVALHAYFLKEGIIQERDRILIIDGGF
RTLEMTDMKQNLILNHYETELGCSKPLKNIKNILQNHAGESNQLHINDMPKILEKGYGD
KEENYETSQVDILIQKELDTHFQDIMRVLQEQFKLDQYDTIIWTGGIVDLHKKQIEKMQG
EIVSFRMVDASKEAALHGYYIIGSQVFEDITNQSAYESKL
gi|229148199|ref|ZP_04276502.1|hypothetical protein bcere0012_52920
[Bacillus cereus BDRD-ST24]
(SEQ ID NO: 329)
MLLGNPYAIDLGNGFTKRASKKNKSLEADVITELSVLAPVDDYYNEASFTKIELTNTDFP
YYIGEEARKSKLPLIRALGENKAKRYEDPTFKKQLFGFIAKDFKKNITIPLLVTGLPVSHF
GNQRESIRKVAMEETAVKVNGELITVKVKECLVIPQPVGTQYYLVKKEIINKEDRILIIDG
GFGTFDVTDMSGNAVIDRLGTELGCEKAFMAIEQIVRDNIGETPDLSVSNMHYILENGY
KYNGSLYDLYTHKDVAEKVDEELQRHFDSSLREVSQKFNLAVYDKIVWTGGMAALHK
KRIEKKKEQFPTFAVLENGQEANLLGYYYLGCDVFDKLTKEKASN
gi|229141745|ref|ZP_04270274.1|hypothetical protein bcere0013_48340
[Bacillus cereus BDRD-ST26]
(SEQ ID NO: 330)
MMNKDSGNSLDMNLIDGFYIETPTNVVEISKDEADSHFVATITNPKELLSRLLISTTIPGE
DTERFFLVGDEAGKHALANNHVNKLHDKITSPIPYVMFLSAVSFYHAINETRESDDNTV
EIEYFQTMLPIWLLKRTAKFSEAQNAMAERFAGEHEVTIHTPGMEKTLKITVEKATCRIE
GEIARLAIKKNFELEDREEARQFDNNDTVLVDIGGGTIDLVLSPAGLKSPKNRDSMQPID
KLSYLSHIEKLRKEKFLEKFSDLRSFETFIVNNFQKPKMELVDGNTGQRVDLTEKIRSSLK
EFAKFLILKIQDVMPAPADKVYKYVYFGGVAPILETSIHEVIEEMYGAEIAQANHIFLPDS
RKLNLYGLEVKSRGEMLQKTEK
gi|229125147|ref|ZP_04254297.1|hypothetical protein bcere0016_54110
[Bacillus cereus 95/8201]
(SEQ ID NO: 331)
MFLTASVDAGNDALKAYIGGLEEENKVYIPNVVKKMEDRPILSLGDDPLAELHLRITSSA
INISGTYAVGTLAVKEKDSSHIPATVMKSDSDQTVILALTALAYYAAMNSKAKKVDVEY
LLSSGLPVDEVKADRRASFKEKLVEGTHVIEFKKTPLLEGKTVNIKFRDAFMNVEGFAA
MVNLTVDDKLQAINNDLKQKNILLNDMGGNTTDKAVIRMGRIDNEYSSGSPLGIGEYL
DAIKKEVFTTFRVDVFKSRRQLVENMTAEKEAYVIRPHGKAESYQAIAEKHLMEFAMR
EYADLVEKWKEVGDLHCIYNVGGSAAIAKPFLEQINKENNQFEMYFLDTEESIWSIAKA
YYKLLLIIAKQKGLDLKK
gi|228928208|ref|ZP_04091249.1|hypothetical protein bthur0010_29070
[Bacillus thuringiensis serovar pondicheriensis BGSC 4BA1]
(SEQ ID NO: 332)
MKSLYAIDVGIGFTKRAYRQDEDSEVTVKSEASTLAPVPNHDESEDLTKVSFIDLDFAYY
MGNEAHQSDASFLPPFEEEIENYYESEQFKQQIFGCIAKDYKENVVLPLVVTGLPVTYFG
SQHEQLQRALKKETSVQIDGKFIHITVENALILQQPVALHAYFLKEGIIQERDRILIIDGGF
RTLEMTDMKQNVILNHYETELGCNKPLKNIKNIVQNHAGESNQLHINDMPNILEKGYGG
REENPQASQIDTLIQKELDTHFQDVMCVLQEQFMLDQYDTIIWTGGIVDLHKKRIKKMQ
GEISSFRMVDASKEAALHGYYMIGSQVFDDITNQSVYESKL
gi|229116639|ref|ZP_04246025.1|hypothetical protein bcere0017_29240
[Bacillus cereus Rock1-3]
(SEQ ID NO: 333)
MRSLYAIDVGIGFTKRAYRQDVDSEVTIKSEASTLAPVPNHAESEDLTKVSFIDLDFAYY
MGNEAHQSDASFLPPFDEEIENYYESERFKQQIFGCIAKDYKENVVLPLVVTGLPVTCFG
SQHEQLQRALKKETSVQIDGKFINITVENALILQQPVALHAYFLKEGIIQERDRILIIDGGF
RTLEMTDMKQNVILNHYETELGCSKPLKNIKNIMQNHGGESNHLHINDMPKILEKRYEC
REENPQTKQVHTLIQKELDAHFQDVMRVLQEQFKLEQYDTIIWTGGIVDLHKKRIEKMQ
GEISSFRMVDASKEAALHGYYIIGSQVFEDITNQSAYESKL
gi|229110589|ref|ZP_04240155.1|hypothetical protein bcere0018_28400
[Bacillus cereus Rock1-15]
(SEQ ID NO: 334)
MKSLYAIDVGIGFTKRAYRQDVDSEMTIKSEASTLAPVPNHAESEDLTKVSFIDLDFAYY
MGNEAHQSDASFLPPFDEEIENYYESERFKQQIFGCIAKDYKENVVLPLVVTGLPVTCFG
SQHEQLQRALKKETSVQIDGKFIHIKVENALILQQPVALHAYFLKEGIIQERDRILIIDGGF
RTVEMTDMKQNVILNHYEAELGCSKPLKNIKNIVQNHEGESNQLHINDMPNILEKGYEC
REENHETSQVHTLIQKELDAHFQDVMRVLQEQFKLEQYNTIIWTGGIVDLHKKRIEKMQ
SEISSFRMVDASKEAALHGYYIIGSQVFEDITNQSAYESKL
gi|229100588|ref|ZP_04231438.1|hypothetical protein bcere0020_57600
[Bacillus cereus Rock3-29]
(SEQ ID NO: 335)
MKITMMNKDSGNSLDMNLIDGFYIETPTNVVEISKDEADSHFVATITNPKELLSRLLISTK
IPGEDTERFFLVGDEAAKHALANNHVNKLHDKITSPIPYVMFLSAVSFYHAINEQRESDD
NTIEIEYFQTMLPIWLLKRTAKFSEAQNAMAERFAGEHEVTIHTPGMEKTLKITVEKATC
RIEGEIARLAIKKNFELEDREEARQFDNNDTVLVDIGGGTIDLVLSPTGLKSPKNRDSMQP
IDKLSYLSHIEKLRKEKFLEKFSDLRSFETFIVNNFQKPKMELVDGNTGQRVDLTDKVRS
SLKEFAKFLILKIQDVMPAPADKVYKYVYFGGVAPILETSIHEVIEEMYGAEIAQANHIFL
PDSRKLNLYGLEVKSRGEMLQKIER
gi|229097636|ref|ZP_04228594.1|hypothetical protein bcere0020_28770
[Bacillus cereus Rock3-29]
(SEQ ID NO: 336)
MRSLYAIDVGIGFTKRAYRQDVDSEVTIKSEASTLAPVPNHAESEDLTKVSFIDLDFAYY
MGNEAHQSDASFLPPFDEEIENYYESERFKQQIFGCIAKDYKENVVLPLVVTGLPVTCFG
SQHEQLQRALKKETSVQIDGKFINITVENALILQQPVALHAYFLKEGIIQERDRILIIDGGF
RTLEMTDMKQNVILNHYETELGCSKPLKNIKNIMQNHGGESNHLYINDMPKILEKRYEC
REENPQTKQVHTLIQKELDAHFQDVIRVLQEQFKLEQYDTIIWTGGIVDLHKKRIEKMQ
GEISSFRMVDASKEAALHGYYIIGSQVFEDITNQSAYESKL
gi|229092129|ref|ZP_04223310.1|hypothetical protein bcere0021_29190
[Bacillus cereus Rock3-42]
(SEQ ID NO: 337)
MKSLYAIDVGIGFTKRAYRQDKDSEVTIKSEASTLAPVPNHDESEDLTKVSFIDLDFAYY
MGNEAHQSDASFLPPFEEEIENYYESEQFKQQIFGCIAKDYKENVVLPLVVTGLPVTYFG
SQHEQLQRALKKETSVQIDGKFIHITVENALILQQPVALHAYFLKEGIIQERDRILIIDGGF
RTLEMTDMKQNVILNHYETELGCSKPLKNIKNILQNHAGESNQLHINDMPNILEKGYGG
REENPQASQVHTLIQKELDTHFQDVMCVLQEQFMLDQYDTIIWTGGIVDLHKKRIEKMQ
GEISSFRMVDASKEAALHGYYMIGSQVFDDITNQSVYESKL
gi|229082948|ref|ZP_04215369.1|hypothetical protein bcere0023_55370
[Bacillus cereus Rock4-2]
(SEQ ID NO: 338)
MNLIDGFYIETPTNVVEISKDEADSHFVATITNPKELLSRLLISTTIPGEDTERFFLVGDEA
GKHALANNHVNKLHDKITSPIPYVMFLSAISFYHAINETRESDDNTIEIEYFQTMLPIWLL
KRTAKFSEAQNAMAERFAGEHEVTIHTPGMEKTLKITVERATCRIEGEIARLAIKKNFEL
EDREEARQFDNNDTVLVDIGGGTIDLVLSPAGLKSPKNRDSMQPIDKLSYLSHIEKLRKE
KFLEKFSDLRSFETFIVNNFQKPKMELIDGNTGQRVDLTDKIRSSLKEFAKFLILKIQDVM
PAPADKVYKYVYFGGVAPILETSIHEVIEEMYGAEIAQANHIFLPDSRKLNLYGLEVKSR
GEMLQKTEK
gi|229080324|ref|ZP_04212849.1|hypothetical protein bcere0023_29710
[Bacillus cereus Rock4-2]
(SEQ ID NO: 339)
MKSLYAIDVGIGFTKRAYRQDVDSEVTIKSEAATLAPVPNHAESEDLTKVSFIDLDFAYY
MGNEAHQSDASFLPPFDEEIENYYESEEFKQQIFGCIAKDYKENVVLPLVVTGLPVTCFG
SQHEQLQRALKKETSVQIDGKFINITVENALILQQPIALHAYFLKEGIIQEQDRILIIDGGFR
TLEMTDMKQNVILNHHETELGCSKPLKNIKNILQNHAGESNQLHINDMPKILEKGYGDK
EENYETSQVDILIQKELDTHFQDIMRVLQEQFKLDQYDTIIWTGGIVDLHKKQIEKMQGE
IVSFRMVDASKEAALHGYYIIGSQVFEDITNQSAYKSKL
gi|229075142|ref|ZP_04208136.1|hypothetical protein bcere0024_28830
[Bacillus cereus Rock4-18]
(SEQ ID NO: 340)
MKSLYAIDVGIGFTKRAYRQDVDSEVTIKSEASTLAPVPNHAESEDLTKVSFIDLDFAYY
MGNEAHQSDASFLPPFDEEIENYYESERFKQQIFGCIAKDYKENVVLPLVVTGLPVTCFG
SQHEQLQRALKKETSVQIDGKFINITVENVLILQQPVALHAYFLKEGIIQERDRILIIDGGF
RTLEMTDMKQNLILNHYETELGCSKPLKNIKNIMQNHAGESNHLHINDMPKILEKGYGG
REENPQTKQVDTLMQKELDVHFQDVMRVSQEQFKLEQYDTIIWTGGIVDLHKKRIEKM
QGEISSFRMVDASKEAALHGYYIIGSQVFEDITNQSAYESKL
gi|229070642|ref|ZP_04203879.1|hypothetical protein bcere0025_28240
[Bacillus cereus F65185]
(SEQ ID NO: 341)
MKSLYAIDVGIGFTKRAYRQDVDSEVTIKSEAATLAPVPNHAESEDLTKVSFIDLDFAYY
MGNEAHQSDASFLPPFDEEIENYYESEEFKQQIFGCIAKDYKENVVLPLVVTGLPVTCFG
SQHEQLQRALKKETSVQIDGKFINITVENALILQQPIALHAYFLKEGIIQEQDRILIIDGGFR
TLEMTDMKQNVILNHYETELGCSKPLKNIKNILQNHEGESNQLHINDMPKILEKGYGDK
EENYETSQVDILIQKELDTHFQDIMRVLQEQFKLDQYDTIIWTGGIVDLHKKQIEKMQGE
IVSFRMVDASKEAALHGYYIIGSQVFEDITNQSAYKSKL
gi|229051382|ref|ZP_04194887.1|hypothetical protein bcere0027_53100
[Bacillus cereus AH676]
(SEQ ID NO: 342)
MLLGNPYAIDLGNGFTKRASKKNKELEAAVITELSVLAEVDDYYNEASFTKIELTNIDSP
YYIGEEARKSKLPLVRALGENKAKRYEDPIFKKLLFGFIAKDFKKSKHISLPLLVTGLPVS
HFGNQRETLEKVITTETSMKVNGEMITVDVKKCLVIPQPVGTQYYLVKKNIIEKDDRILII
DGGFGTLDVTDMSGNSVIGRLGTELGCEKAFLNIEQIVRDNIGETPELSVSNMHYILENS
YKYNGNSHNLYKDDKVSEKVESELKHHFASVLREVSQKFNFAVYDKIIWTGGMASLHK
ALIIEQQTKFPTFELLENGQEANLLGYYYLGDDVFDKITKEKAAN
gi|229046843|ref|ZP_04192477.1|hypothetical protein bcere0027_28580
[Bacillus cereus AH676]
(SEQ ID NO: 343)
MKSLYAIDVGIGFTKRAYRQDVDSEMTIKSEASTLAPVPNHAESEDLTKVSFIDLDFAYY
MGNEAHQSDASFLPPFDEEIENYYESERFKQQIFGCIAKDYKENVVLPLVVTGLPVTCFG
SQHEQLQRALKKETSVQIDGKFIHITVENALILQQPVALHAYFLKEGIIQERDRILIIDGGF
RTVEMTDMKQNVILNHYEAELGCSKPLKNIKNMVQNHEGESNQLHINDMPNILEKGYE
CREENHEASQVHTLIQKELDAHFQDVMRVLQEQFKLEQYNTIIWTGGIVDLHKKRIEKM
QSEISSFRMVDASKEAALHGYYIIGSQVFEDITNQSAYESKL
gi|229035414|ref|ZP_04189316.1|hypothetical protein bcere0028_54040
[Bacillus cereus AH1271]
(SEQ ID NO: 344)
MLLGNPYAIDLGNGFTKRASKKNKDLEAAVVTELSVLAPVDDYYNEAEFTKIELTNTDF
PYYIGEEARKSKLPLVRALGENKAKRYEDPTFKKQLFGFIAKDFKKNVTIPLLVTGLPVS
HFGNQRESLQKVAMEETAVKVNGELITIKVKQCLVIPQPVGTQYYLVKKEIIKKEDRILII
DGGFGTFDVTDMSGNAVIDRLGTELGCEKAFMTIEQIVRDNIGETPDLSVSNMHYILENG
YKYNGSLYDLYTHKDVAEKVDAELQRHFDAALREVSQKFNLAVYDKIVWTGGMAAL
HKKRIEKKKEQFPTFAVLENGQEANLLGYYYLGCDVFDKLTKEKASN
gi|229030821|ref|ZP_04186843.1|hypothetical protein bcere0028_28850
[Bacillus cereus AH1271]
(SEQ ID NO: 345)
MKSLYAIDVGIGFTKRAYQQDVDSEVTIKSEASTLAPVPNHAESDDLTKVSFIDLDFAYY
MGNEAHQSDAAFLPPFDEEIENYYESEQFKQQIFGCIAKDYKENVVLPLVVTGLPVTCFG
SQHEQLQRALKKETSVQIDGKFIHITVENALILQQPVALHAYFLKEGIIQERDRILIIDGGF
RTLEITDMKQNVILNHYETELGCSKPLKNIKDILQNHAGESNQLHINDMPNILEKGYGGR
EENHQTSQVDTLIQKELDAHFQDVMRVLQEQFKLDQYDTIIWTGGIVDIHKKRIEKMQG
EISSFRMVDASKEAALHGYYMIGNQVFDDITNQSAYESKL
gi|229030425|ref|ZP_04186465.1|hypothetical protein bcere0028_24950
[Bacillus cereus AH1271]
(SEQ ID NO: 346)
MSILLKAGADAGNNGLKLMVKGQDPIFIPSIYSLYIGEPTGLLDEGDVSLSELENHIDVTI
SSPSLMLNNVRYIVGEKVIQDQLKGTEVEKKSNKSTDELMVITILSGLAVSAMRQSPTSS
HINIRYDLSVALPMQLITQEIAAGNAKRYMGNHKVVFHYPNGRDVTINISIEYCKCLPEG
ASGTWGIVYDEEGNVVKHKIECEQNQVSEIDFVDKTLLSFDIGAGTTEEVVSLGVNFRPQ
LSKGLSYGVKETLLQIITRWNRKYPTKTIDSITEFNQIYLHEKHPRNALLVEESQPALLGL
AARVATDIINKIDDMKDDPYVFIYGGGAVIIKNSLKMILKQKGRLTNVIFVDNPLFTNAR
GLLVYTCSPKYREHKQKELGFTNLTIS
gi|229009322|ref|ZP_04166606.1|hypothetical protein bmyco0002_60080
[Bacillus mycoides Rock1-4]
(SEQ ID NO: 347)
MKIGRKVADFGNSFNNFMVDGYYIELATNVVKISKKKAEDLLVDRISRPEDLLDRLLIST
EIDGEESFYLVGQLAEDNQLANSHVNKMHDKINSPIPYISFLGAIAYYHALNAEQEDNVV
EIENMSMMLPIWLLKREEKFSIAHKKMEERFTGEHKVKVLTPGMERELTITVNSAKCKN
ESEVARHSLKYKMVSKDKNTSVISIEKRYESERFDDYEVVLTDIGGGSTDAVRLGKGLT
TPKHRDSFQVIDVEPFLGYLERFRKEKLIQYFKDLRTLEKFIVNNYKEQKYVLSNENTGE
EYDFTTEIVEALKEYARILVAKVLDVFIPSSTNTVLKFIYIGGEAPVLEPYIRLALLDHMSE
TAAKNNHFFLNDIIQNSEKEVFAPTSRTINLAALELKAIDEMKGQLA
gi|228995195|ref|ZP_04154917.1|hypothetical protein bpmyx0001_58160
[Bacillus pseudomycoides DSM 12442]
(SEQ ID NO: 348)
MKLNYFVEDDNGNSEKKITINGEMMKFPNTYSYVYKDPVPQDKKIEELVHGLIRNMDV
TVNSSALKGQVAQRIFVGERAIRSGADLQNLNIRSNRGKHKQDTTIMTTVSAIACRAVQ
DMFNKENSLEEGTNVEVNVLMVTALPASEWTKEKAKQLSDRFTNSSHHVTVTVGDVRI
YVTLKFDKVIVVQEGTVALFALIEDGKGNYRDDDLFNEFKEMYNLKNITGEYFQEKRLL
HIDIGDGTTEYVVTKGYDYDNDHSSGERHGIGHAIERAKKDFEDEWGFSVERQEFAGYL
KEVHPKYYDDAKKFLARAKFNLADEVLDTAETKLQDLKYDVDVVCVYGGGSIQLKEN
LFEELKEICDSKKIKILWINPKNATEMNVKGMTVFSSIALQTEQVN
gi|228994350|ref|ZP_04154236.1|hypothetical protein bpmyx0001_50640
[Bacillus pseudomycoides DSM 12442]
(SEQ ID NO: 349)
MKIGRKVADFGNSFNNFMVDGYYIELATNVVKISKKQAEDLLVDRISRPEDLLDRLLIST
EIEGEESFYLVGQLAEDNQLANSHVNKMHDKINSPIPYVSFLGAIAYYHALNAEQEDNE
VEIEHMSMMLPIWLLKREEKFSIAHKKMEERFIGEHKVKVLTPGMEKELTIRVNSAKCR
NESEVARHSLKYKMVSKDQNTNVISIEKRYESERFDDYEVVLTDIGGGSTDAVRLGKGL
TTPKHRDSFQVIDIEPFLGYLERFRKEKLIQYFKDLRTLEKFIVNNYKVQKYVLSNENTGE
EYDFTNEIVEALKEYARILVAKILDVFIPSSTNTVLKFIYIGGEAPVLEPYIRLALLNHMSE
MAAKNNHFFLNDIIQNSDKEVFAPTSRTINLTALELKVIDEMKGQLA
gi|228988741|ref|ZP_04148822.1|hypothetical protein bthur0001_53920
[Bacillus thuringiensis serovar tochigiensis BGSC 4Y1]
(SEQ ID NO: 350)
MKSLYAIDVGIGFTKRAYRQDVDSEVTIKSEASTLAPVPNHAESEDLTKVSFIDLDFAYY
MGNEAHQSDASFLPPFDEEIEHYYESEQFKQQIFGCIAKDYKENVVLPLVVTGLPVTCFG
SQHEQLQRALKKETSVQIDGKFITITVENALILQQPVALHAYFLKEGIIQERDRILIIDGGF
RTLEMTDMKQNVILNHYETELGCSKPLKNIKNIVQNHAGESNQMHINDMPNILEKGYG
GREEDPQTSQVDTLIQKELDAHFQDVMRVLQEQFKLEQYDTIIWTGGIVDLHKKRIEKIQ
GEISSFRMVDASKEAALHGYYMIGSQVFDDITNQSVYESKL
gi|228943103|ref|ZP_04105591.1|hypothetical protein bthur0008_57000
[Bacillus thuringiensis serovar berliner ATCC 10792]
(SEQ ID NO: 351)
MVEQMLSKNMLLGGFDTGNIKAKISFLNEKGNIESFAIPTVIAEAPPAKIDLKSAPSKKN
DYVNEKDEDIELLHVRIISNSLDGDARSRAWYVGAYAKDQEDRQEPTVDEMGKTEDKF
SQKNKKLHLIPLFTSMAVAAARIGKEEVFVPFSGGMPIEDYKLRGEEQILEMLYGEHTVE
FLDGTYEGKKIKITINDGTMNVEGVSSVLAILFDIVNGEIVEVEGMDAEIGESYAINDLGA
GTSDNAFFEDGELNKKLSTNTDLGTNKYIDEILKNIKERFMENEILKSFMTDEIESPFKTR
EDFIQRLVMPEVEKMIEDDTYKPTFSVKWGPVKENVTDIVMDGMLKYAEDQKASLMK
FWFKTNADKNIVVGGGVLFGYAGLRDLKEQDGFILPKNIQESAYFTSRSYLIANLLEQLN
KEGVEA
gi|228940222|ref|ZP_04102793.1|hypothetical protein bthur0008_28710
[Bacillus thuringiensis serovar berliner ATCC 10792]
(SEQ ID NO: 352)
MKSLYAIDVGIGFTKRAYRQAVDSEMTIKSEASTLAPVPNHAESEDLTKVSFIDLDFAYY
MGNEAHQSDASFLPPFDDEIENYYESERFKQQIFGCIAKDYKENVVLPLVVTGIPITCFGS
QHEQLQRALKKETSVQIDGKFIHITVENALILQQPVALHAYFLKEGIIQERDRILIIDGGFR
TLEMTDMKQNLILNHYETELGCSKPLKNIKNIVQNYEGESNQLHINDMPNILEKGYECR
EENHETSQVHTLIQKELDAHFQDVIRVLQEQFTLEQYDTIIWTGGIVELHKKRIEKMQSEI
SSFRMVDASKEAALHGYYIIGSQVFDDITNQSAYESKL
gi|228942652|ref|ZP_04105183.1|hypothetical protein bthur0008_52780
[Bacillus thuringiensis serovar berliner ATCC 10792]
(SEQ ID NO: 353)
MDLMEIKTYSIDLGNGYTKRIVNGECIVEPSVIADVESYFSDDVDVTTLQLSEGEAYFTG
DDVGILGLKPISALGEHDMDRYETPEFKKMIFGFLAKDFKQDVTIERLVTGLPVQHFKTK
GKIVEELLKGRTVVKVNDKDIIIDIKNVSIIPQPIGTYLHLVAKKAVTPNKDLTLIVDCGH
GTLDVTELKGKTIVKRAGNNEGAKEAYINIYNTLVEEYGSLKELTISNIQNILLDGLLVSG
SRINVRAKSEVQKILKKHFNSIFTFLQDNKFDLRSYDKVVFTGGIVHLYHDYFGERAEAN
FLVVEDGQTANARGYHEYGKAMTKK
gi|228969497|ref|ZP_04130308.1|hypothetical protein bthur0004_61720
[Bacillus thuringiensis serovar sotto str. T04001]
(SEQ ID NO: 354)
MGNGYTKRIVNGECIVEPSVIADVESYFSDDVDVTTLQLSEGEAYFTGDDVGILGLKPIS
ALGEHDMDRYETPEFKKMIFGFLAKDFKQDVTIERLVTGLPVQHFKTKGKIVEELLKGR
TVVKVNDKDIIIDIKNVSIIPQPIGTYLHLVAKKAVTPNKDLTLIVDCGHGTLDVTELKGK
TIVKRAGNNEGAKEAYINIYNTLVEEYGSLKELTISNIQNILLDGLLVSGSRINVRAKSEV
QKILKKHFNSIFTFLQDNKFDLRSYDKVVFTGGIVHLYHDYFGERAEANFLVVEDGQTA
NARGYHEYGKAMTKK
gi|228968718|ref|ZP_04129686.1|hypothetical protein bthur0004_54810
[Bacillus thuringiensis serovar sotto str. T04001]
(SEQ ID NO: 355)
MVEQMLSNNMLLGGFDTGNIKAKISFLNEKGNIESFSVPTVIAEAPPAKIDLKSAPSKKN
DYVNEKDEDIELLHVRIISNSLDGDARSRAWYVGAYAKDQEDRHEPTVDEMGKTEDKF
SQKNKKLHLIPLFTSMAVAAARIGKEEVSVPFSGGMPIEDYKLRGEEQILEMLYGEHTVE
FLDGTYEGKKITITINDGTMNVEGVSSVLALLFDIVNGEIVEVEGMDAEIGESYAINDLG
AGTSDNAFFEDGELNKKLSTNTDLGTNKYIDEILKNIKERFMENKILKSFMTDEIESPFKT
REDFIQRLVMPEVEKMIEDDTYKPTFSVKWGPVKENVTDIVMDGMLKYAEDQKASLM
KFWFKTNADKNIVVGGGVLFGYAGLRDLKEQDGFILPKNIQESAYFTSRSYLIANLLEQL
NKEGVEV
gi|228966097|ref|ZP_04127160.1|hypothetical protein bthur0004_29130
[Bacillus thuringiensis serovar sotto str. T04001]
(SEQ ID NO: 356)
MGNEAHQSDASLLPPFNEEIENYYESERFKQQIFGCIAKDYKENVVLPLVVTGLPVTCFG
SQHEQLQHALKKETSVQIDGKFINITVENALILQQPVALHAYFLKEGIIQEQDRILIIDGGF
RTLEMADMKQNLILNHYETELGCSKPLKNIKNILQNHAGESNQLHINDMPKVLEKGYEC
REENHETSQVHTLIQKELDAHFQDVIRVLQEQFTLEQYDTIIWTGGIVDLHKKRIEKMQS
EISSFRMVDASKEAALHGYYIIGSQVFDDITNQSAYESKL
gi|228962371|ref|ZP_04123775.1|hypothetical protein bthur0005_57060
[Bacillus thuringiensis serovar pakistani str. T13001]
(SEQ ID NO: 357)
MKSPYAIDLGIGFTKRAYRKHVNSPTTIKSEASTLAPVPIEDESENLTKVSFMDVDFAYY
MGEEAHQSEASFLPPFEEDIEHYYESNRFKQQLFGCIAKDYQENIVLPLVVTGLSLSCFG
KQHEQLQKIIKKETSVQLDGKFITITVENALLLPQPIALHAYFVEESIIQERERVLIIDGGFR
TLEITDMKQQLILNRYETELGCRKPLKKIENILREHVGESPTLHLHNLPDILDKGYICKEEI
HCLQTSPISALVQKELNAHFQEILDVVQEQFLFHQYDKIIWTGGVVDMHKKRIQEKQGA
YPSIHILEPAKEAALHGYYILGCRVFEDIVQQPV
gi|228962224|ref|ZP_04123662.1|hypothetical protein bthur0005_55780
[Bacillus thuringiensis serovar pakistani str. T13001]
(SEQ ID NO: 358)
MMNKDAGNSLDMNLIDGFYIETPTNVVEISKDEANSHFVATITNPKELLSRLLISTTIPEE
DTERFFLVGDEASKHALANNHVNKLHDKTTSPIPYIMFLSAISFYHAINETRESDENTIEIE
YFQTMLPIWLLKRTAKFSEAQHAMAARFTGEHEVTIHTPGMEKTLKIIVEKAICRIEGEIA
RLAIKKNFELEDREEARQFDDNDTVLVDIGGGTIDLVLSPAGLKSPKNRDSMQPIDKLSY
LSHIEKLRKEKFLEKFSDLRSFETFIVNNYQKPKMELVDGNTGQRIDLTEKIQSSLKEFAR
FLILKIQDVIPAPSDKVYKYVYFGGVAPILKTNIHEVIEEMYGAEIAQANHIFLPDSRKLN
LYGLEIKSRGEMLQKTKK
gi|228961763|ref|ZP_04123365.1|hypothetical protein bthur0005_51990
[Bacillus thuringiensis serovar pakistani str. T13001]
(SEQ ID NO: 359)
MMRTVADIGNSELKMVINGGKVIKLPDVNKRVFGRVTNKEGSLKQSVTNLMNEICVHV
TSDAIERDGKFYVGYRAAHSNGKPDALDIELGDKYKRDIPVVNVLSVMATKAVQTIYEE
VGELPKSIEVPASLILAIPASEYEGKKARFLESRFKENVHIVIVYVGEEKVTVQIKFETVKV
TREGIPALYAIFEGNQDMFDDFNKLYKKETDSKEDDKEVKKRKANLMVEEEVNGEYFK
NKKILHADIGDGTSEYIFSKGLNPVPDACWGEKRGIGHAIEGAIKLLQEEYEGGVDINRQ
QFSELVTDPNDKKHDKAVEFLEETRYMQAQGIYDDIEKAYVYKTASQAEVLAVYGGGS
IALKEDLYKKAFEFCEVNDMQLLWISPTYATEMNVRGMEILSKKLASRVAKK
gi|228959387|ref|ZP_04121078.1|hypothetical protein bthur0005_28730
[Bacillus thuringiensis serovar pakistani str. T13001]
(SEQ ID NO: 360)
MKSLYAIDVGIGFTKRAYRQDVDSEMTIKSEASTLAPVPNHAESEDLTKVSFIDLDFAYY
MGNEAHQSDASFLPPFDEEIENYYESERFKQQIFGCIAKDYKENVVLPLVVTGLPVTCFG
SQHEQLQRALKKETSVQIDGKFIHITVENALILQQPVALHAYFLKEGIIQERDRILIIDGGF
RTVEMTDMKQNVILNHYEAELGCSKPLKNIKNIVQNHEGESNQLHINDMPNILEKGYEC
REENPETSQVHTLIQKELDAHFQDVMRVLQEQFKLEQYNTIIWTGGIVDLHKKRIEKMQ
SEISSFRMVDASKEAALHGYYIIGSQVFEDITNQSAYESKL
gi|228953457|ref|ZP_04115502.1|hypothetical protein bthur0006_28360
[Bacillus thuringiensis serovar kurstaki str. T03a001]
(SEQ ID NO: 361)
MKSLYAIDVGIGFTKRAYRQDVDSEVTIKSEAATLAPVPNHAESEDLTKVSFIDLDFAYY
MGNEAHQSDASFLPPFDEEIENYYESEQFKQQIFGCIAKDYKENVVLPLVVTGLPVTCFG
SQHEQLQRALKKETSVQIDGKFINITVENALILQQPIALHAYFLKEGIIQEQDRILIIDGGFR
TLEMTDMKQNVILNHYETELGCSKPLKNIKNILQNHAGESNQLHINDMPKILEKGYGDK
EENYETSQVDILIQKELDTHFQDIMRVLQEQFKLDQYDTIIWTGGVVDLHKKQIEKMQG
EIVSFRMVDASKEAALHGYYIIGSQVFEDITNQSAYKSKL
gi|228950528|ref|ZP_04112678.1|hypothetical protein bthur0007_65790
[Bacillus thuringiensis serovar monterrey BGSC 4AJ1]
(SEQ ID NO: 362)
MKMLITAAIDAGNDALKALFNGFENKLYIPNVVKEMESRQVIELGDDPLKELHVHITSS
ALKKSATYAVGTLAAKEKQSAQIPATDLKSESDQTTILMLTALAYEAASNSDKDVIDAE
FLLSTGLPVDEVKEDKRAGFKKKLLEGTHVVEFKKTPHLEGKKVRISFKDIFVNVEGFA
AMINLTISEELKSQNSELRQKNILINDMGGNTTDKAVIRMGQIDNEYSSGSPLGIGEYLDA
IRKEVFNTYRVDVFKSRRQLVENMTAKHEAYIIRPHGKPVSYYEIAEKHLKEFTVREYA
DLVDKWKEVGDLHSIHNVGGSAAIVKSFLEDINKNENQFEMHFLDTEESIWSIAKAYYK
LLLVIAKQKELSLN
gi|228950249|ref|ZP_04112426.1|hypothetical protein bthur0007_63150
[Bacillus thuringiensis serovar monterrey BGSC 4AJ1]
(SEQ ID NO: 363)
MDAGNDALKAFIGGLGEDHKVYIPNVIKKMDDRPILSLGDDPLSELHLRITSSAINISGTY
AVGTLAVKEKDSSHIPATVLKSESDQTVILTLTALAYYAAMHSKAKKVDVEYLLSSGLP
VDEVKADKRAAFKEKLIEGTHVIEFKKTPLLEGKTVNIKFRDAFMNVEGFGAVINLTVD
DKLQAINNELKQKNILINDMGGNTTDKAVIRMGRIDNEYSSGSPLGIGEYLDAIKKEVFT
TFRVDVFKSRRQLVENMTAEKEAFIIRPHGKAESYQAIAEKHLMEFAMREYADLVDKW
KEVGDLHSIYNVGGSAAIAKPFLEQINKENNQFEMHFLDTEESIWSIAKAYYKLLLIIAKQ
KGLDLKK
gi|228936872|ref|ZP_04099626.1|hypothetical protein bthur0009_52840
[Bacillus thuringiensis serovar andalousiensis BGSC 4AW1]
(SEQ ID NO: 364)
MKINMMNKDSGNSLDMNLIDGFYIETPTNVVEISRDEADSHFVASITNPKELLSRLLISTT
IPGEDNERFFLVGDEAAKHALANNHVNKLHDKITSPIPYIMFLSAISFYHAINEQREPDDN
TVEIKYFQTMLPIWLLKRTAKFSEAQNAMAERFAGEHEVTIHTPGMGKTLKITVEKATC
RIEGEIARLAIKKNFELEDREEARQFDNNDTVLVDIGGGTIDLVLSPAGLKSPKNRDSMQ
SIDKLSYLSHIEKLRKEKFLEKFSDLRSFETFIVNNFQKPKMELIDGNTGQRIDLTDKLRSS
LKEFAKFLILKIQDVMPAPADKIYKYVYFGGVAPILETSIHEVIEEMYGTEIAQANHIFLP
DSRKLNLYGLEVKSRGEILQKTEN
gi|228934411|ref|ZP_04097247.1|hypothetical protein bthur0009_28680
[Bacillus thuringiensis serovar andalousiensis BGSC 4AW1]
(SEQ ID NO: 365)
MKSLYAIDVGIGFTKRAYRQDEDSEVTVKSEASTLAPVPNHDESEDLTKVSFIDLDFAYY
MGNEAHQSDASFLPPFEEEIENYYESEQFKQQIFGCIAKDYKENVVLPLVVTGLPVTYFG
SQHEQLQRALKKETSVQIDGKFIHITVENALILQQPVALHAYFLKEGIIQERDRILIIDGGF
RTLEMTDMKQNVILNHYETELGCSKPLKNIKNIVQNHTGESSHLHINDMPNILEKGYGG
REENPQASQVGTLIQKELDTHFQDVMCVLQEQFMLDQYDTIIWTGGIVDLHKKRIEKMQ
GEISSFRMVDASKEAALHGYYMIGSQVFDDITNQSVYESKL
gi|228904462|ref|ZP_04068557.1|hypothetical protein bthur0014_56070
[Bacillus thuringiensis IBL 4222]
(SEQ ID NO: 366)
MEKAQLILDLGNSETRGVLRVGEIINKTRIEHNFYLSNYFSPIFEGVGGIPESDDYTEENST
VFTLDDDFKIGNGVVNRDTYVNGLMCSNEFSDTQDKPTAMTKKYDSSYTVLTIITAIKQ
SAIWMKDYFGKKGKNFSVQQLINEVAWELTILLPPSQEKAGGLVLQETLVGQIPVKFEL
PKADARINITKVTIRAEGMMAYTGVLLSKTRRQPRPNKIFMQKAKVMVLDIGAGTTDLI
VIDQGKAIERSKYTIDLGGNNITQTLRTTVQTNLEIRLSAQVFEQGVITGKVKQGLKEHD
VTDELIGAKRSVAAKISKEVKDYLESSGIEANSIEYILVVGGGSIPSENDKVKPISDYLLDS
IKRFAPQVGLVDISDIITKPNSVAFENVADADFVSSRELNISGAGTVTDLLEIKQYLAQQE
QAKQVQA
gi|228924761|ref|ZP_04087924.1|hypothetical protein bthur0011_56620
[Bacillus thuringiensis serovar huazhongensis BGSC 4BD1]
(SEQ ID NO: 367)
MTKVFAIDHGNGAVKMRTDVFKKTLPAIYSFSSNVGEALSGGKMKLKTYKVEGTEYV
WGDDIIKVNNTLNTYAQQNRYKTNQYKTLSKIALAEMAAKTNVKSYDEILVVTGVPSQ
EIGTKAVDEIKEVYQGTHELEVNGKKVTLNVVDVIVLAQPVGTVMSRYLDEDGFVADD
SYEDMTVGIIDIGTGTTDLDVISMLRREKESTSVPKGMHDVYEPIVAKIKKETSATINDYK
LEKVFEEGAYQASKRMDPIDFNDEKTASIKEVYDFIVNGVNNAWKTFDRFDEVLVSGG
GANTFHELLEEWIGKVTKLEESQTANVEGFYRYGKFEVGEEDGE
gi|228921815|ref|ZP_04085130.1|hypothetical protein bthur0011_28110
[Bacillus thuringiensis serovar huazhongensis BGSC 4BD1]
(SEQ ID NO: 368)
MKSLYAIDVGIGFTKRAYRQDVDSEMTIKSEASTLAPVPNHAESEDLTKVSFIDLDFAYY
MGNEAHQSDASFLPPFDEEIENYYESERFKQQIFGCIAKDYKENVVLPLVVTGLPITCFGS
QQEQLQRALKKETSVQIDGKFINITVENALILQQPVALHAYFLKEGIIQERDRILIIDGGFR
TLEMTDMKQNLILNHYETELGCSKPLKNIKNIVQNHTDESNQLHINDMPNILEKGYECR
EENHETSQVHTLIQKELDAHFQDVMRVLQEQFKLEQYDTIIWTGGIVDLHKKRIEKMQG
EISSFRMVDASKEAALHGYYIIGSQVFEDITNQSAYESKL
gi|228915737|ref|ZP_04079319.1|hypothetical protein bthur0012_29560
[Bacillus thuringiensis serovar pulsiensis BGSC 4CC1]
(SEQ ID NO: 369)
MKSLYAIDVGIGFTKRAYRQDEDSEVTVKSEASTLAPVPNHDESEDLTKVSFIDLDFAYY
MGNEAHQSDASFLPPFEEEIENYYESEQFKQQIFGCIAKDYKENVVLPLVVTGLPVTYFG
SQHEQLQRALKKETSVQIDGKFIHITVENALILQQPVALHAYFLKEGIIQERDRILIIDGGF
RTLEMTDMKQNVILNHYETELGCSKPLKNIKNIVHNHAGESDHLHINDMPNILEKGYGG
REEDPQTNQVHILIQKELDAHFQDVMRVLQEQFKLDQYDTIIWTGGIVDLHKKRIEKMQ
GEISSFRMVDASKEAALHGYYMIGSQVFDDITNQSVYESKL
gi|228908908|ref|ZP_04072739.1|hypothetical protein bthur0013_30650
[Bacillus thuringiensis IBL 200]
(SEQ ID NO: 370)
MKSLYAIDVGIGFTKRAYRQDIDSEMTIKSEASTLAPVPNHTDSEDLTKVSFIDLDFAYY
MGNEAHQSDASLLPPFDEEIENYYESERFKQQIFGCIAKDYKENVVLPLVVTGLPVTCFG
SQHEQLQHALKKETSVQIDGKFINIKVKNALILQQPVALHAYFLKEGIIQEQDRILIIDGGF
RTLEMADMKQNLILNHYETELGCSKPLKNIKNILQNHAGESNQLHINDMPNILEKGYEC
REENHETSQVHTLIQKELDAHFQDVMRVLQEQFKLEQYDTIIWTGGIVDLHKKRIEKMQ
GEISSFRMVDASKEAALHGYYIIGSQVFDDITNQSAYESKL
gi|228905653|ref|ZP_04069581.1|hypothetical protein bthur0014_66980
[Bacillus thuringiensis IBL 4222]
(SEQ ID NO: 371)
MMNKDSGNSLDMNLIDGFYIETPTNVVEISKDEADSHFVATITNPKELLSRLLISTTIPGE
DTERFFLVGDEAGKHALANNHVNKLHDKITSPIPYVMFLSAVSFYHAINETRESDDNTV
EIEYFQTMLPIWLLKRTAKFSEAQNAMAERFAGEHEVTIHTPGMEKTLKITVEKATCRIE
GEIARLAIKKNFELEDREEARQFDNNDTVLVDIGGGTIDLVLSPAGLKSPKNRDSMQPID
KLSYLSHIEKLRKEKFLEKFSDLRSFETFIVNNFQKPKMELVDGNTGQRVDLTDKIRSSL
KEFAKFLILKIQDVMPAPADKVYKYVYFGGVAPILETSIHEVIEEMYGAEIAQANHIFLPD
SRKLNLYGLEVKSRGEMLQKTEK
gi|229587486|ref|YP_002860524.1|hypothetical protein CLJ_0217
[Clostridium botulinum Ba4 str. 657]
(SEQ ID NO: 372)
MNKYTIAIDLGYGQIKGINQDNKRVIFPSIISSGKDRSLDTFFNSIDNIVDNIHVKILDEYFN
EKEYFVGELAKRQPSNSSFINRDNKINSEENKVLLATALGLLIPNDLSNDTKIHIVTGLPL
EHFIKQKQALNDMLKDFEHTIKFVDHNFSRNIKFEESNITLFPQGAGAIFSKINNDISSLLI
KETFIGLIDVGFKTTDIVVFRINKDKEPVFEQEMSATLDGLGMINIYNTMDKAFTDNSRD
GSKLNTEQLMLLCEEGKIFFKGDYIDLKKDLIKARKTLSTNIINKADGLWGSRKNSFNSI
MIAGGGGKVLYNHLKLIEPNMCQLIDNPEFANAIGYLEFGKQFK
gi|229542391|ref|ZP_04431451.1|hypothetical protein BcoaDRAFT_4956
[Bacillus coagulans 36D1]
(SEQ ID NO: 373)
MGKTRIAAVDVGNDSLKGIFGKMEYELNIPNVIARDIEDRPVIGIEELDSKDPLEGIHVKV
HSPALKENNVIYRVGDLATKSDNATELDPGSSKSEEDQTLVLLFTSLALDAVREENAKV
FTRNQNVIDANYTLGTGLPLREVKEGKDAGYRSQLLGSVHQVEFLVTPKYQGLKVNLK
FDEIKVYPEGFAAFINLVMDNDLNIINRELIDKRILIQDIGGLSTDIAVIKNRTVDDDRAQG
FNLGVSEALEQIREEIRVKYGVELDSRRDVVDIITKKHDRNHIMVKGSRTSVHDITDRILF
DLAKKQYRLLRNVWQKNSQTEICYFVGGGSVVLKDYLKTLNNSLDGYNIDFFEDEKESI
WMMANAYYKLISDYVRKNNKPEDKGKKPVESK
gi|229516089|ref|ZP_04405539.1|Rod shape determination protein [Vibrio
cholerae RC9]
(SEQ ID NO: 374)
MEDFMSQFVLGLDIGYSNLKMAMGYKGEEARTVVMPVGAGPLELMPQQLTGGAGTCI
QVVIDGEKWVAGVEPDRLQGWERELHGDYPSTNPYKALFYAALLMSEQKEIDVLVTGL
PVSQYMDVERREALKSRLEGEHQITPKRSVAVKSVVVVPQPAGAYMDVVSSTKDEDLL
EIIQGGKTVVIDPGFFSVDWVALEEGEVRYHSSGTSLKAMSVLLQETDRLIQEDHGGAPG
IEKIEKAIRAGKAEIFLYGEKVSIKDYFKKASTKVAQNALIPMRKSMREDGMDADVVLL
AGGGAEAYQDAAKELFPKSRIVLPNESVASNARGFWFCG
gi|237667571|ref|ZP_04527555.1|conserved hypothetical protein
[Clostridium butyricum E4 str. BoNT E BL5262]
(SEQ ID NO: 375)
MITVVDLGNYNVKAMNSLTAKSIFKSNISRDYESYPDAFKHIKIDGEYTYFEKGPFSMEY
IKTKKDYTAQLMYAIASLNEAEDEIKTNLTLLLPISEIQEKHKYIDEIKGKTFNCSVKLKT
KINKNITIEDVMVLPEGYVIYFKLGEKYKTSSIVIVDIGGRTTNLVAMVNGEPKVLKTLKI
GALDFYAKIRELHADKEYNLEDIERLIKEGKVVVTDKQIAQFANDILNQIKQHIKLEHYE
HVLFAGGGAIIIEKIIKDILPDNCEIVDEPLESNMEGAMEASKMAWNE
gi|242308945|ref|ZP_04808100.1|conserved hypothetical protein
[Helicobacter pullorum MIT 98-5489]
(SEQ ID NO: 376)
MQKIAIDLGYGDTKVMANGKLFKFPSAISQVRQSLIQAEKKDTFLFNGIEYEVGSKALR
NAVATRGYLFLQKYSPLLIFNALLEAQFDLKKPIEIATGLSLVNQSEAQDFLKHIESFVVN
DIQIKPQISLFAQGQGIYNEANIQSNGLVCVIDIGYNTFDFLVFENNQPKVELCFANKMGA
NLAIVDLQKLLIKEFKVDFSEQEAKEVFLKKEVRIAGKSIDFADIVNSAIQNYTNFIFDELF
SKSGDTLKKAEAVIIGGGGAYFLTKEHLEQVHNANYVFSDNPEFANVRGYYKGSFSNKE
gi|240141815|ref|YP_002966323.1|hypothetical protein MexAM1_META2p0044
[Methylobacterium extorquens AM1]
(SEQ ID NO: 377)
MAEAAMKKERGAKEGVQPLVAIDDGYAQTKLYGEGLDGRIVKRVLRSSVRIGSHGLGS
FAGDGAIGLWQTEEGNKYTVSDEIEAEDPRFTDFHLSPINRVLVNHALSAAGFGGAKVD
IVTGLPVKEFFKEQRKDEERIQRKRENLQRGAFSRSAGVEAPVLADIQVGCQAIAAFVD
WALDDEMKTRNDIAKTIAIVDIGGRTTDVAVVVGGKSIDHGRSGTADVGVLDVYKGVL
DRVKGRFELDDDSLPLSLMNEAVRTGSMQLFGKPHDVSEIVSDVVGQVQERALREIQRR
LGRAATLQAVVFVGGGSALFKDIASAYPNGVMSDDPEFANARGLYKYFASRRRS
gi|241762997|ref|ZP_04761059.1|conserved hypothetical protein
[Acidovorax delafieldii 2AN]
(SEQ ID NO: 378)
MELIVRAVDVGSGNTKLVTGVAGADIRCASFPSVAYPSSGETPQWPASERRKTFCIPVGP
LFYEVGPDVGLAADTFRAKQLHDEYTESPEYMALLRGALSMMKVPHIDLLIVGLPVALF
TLKKAALEKAMVGSHQVGGGKTVTVAKAMAVAQPQGALVHYAAEHQKIESIGTEQSL
VIDPGSRTFDWLVTRGMRLVQKQSHSINRGMSDVLRLLAAEVSKDLGTPYRDYDAIDL
ALRTGKAPVIFQKPYDMKRHLPLAESVAQQAVSTMRQWIETPESLQNIILVGGGAFLFK
KAVKAAFPKHRIHEVKEPMFANVRGFQLAGQNYAASTMAPGRDRGAGEAA
gi|241762722|ref|ZP_04760786.1|conserved hypothetical protein
[Acidovorax delafieldii 2AN]
(SEQ ID NO: 379)
MWERSLHADYTGTDSYKALFHAGLLLTSATEIDVLVTGLPVSQYQDESRRKALEKQFT
GKRKITPKRTVEAASVKVVAQPIGGLFDMVNQDESQGEDGDIDEEARILVVDPGFFSLD
WVLVSNGEFHRQSSDTSLKASSVLLEQAGLLIAQDYGAKPTVEALENAVRAGITSILMM
GQRVDFGPYLKRAGESMSSTIANSIQKSLRNEKMSPDIVVLTGGGADFFRDIIQDAFPRL
KVVSPKESVLSNARGFWLLGSIN
gi|242262841|ref|ZP_04807504.1|StbA family protein [Clostridium
cellulovorans 743B]
(SEQ ID NO: 380)
MIMGIDVGYSHTKVYTSNGRDIFRSTVTNGIMDINVNAIKVKIAGNEYTVGENTGNFSV
KLNKIDDAVFRLCLYTAVARNLPIGEDEVQLVIGLPVQYYKDQKLELKKALEGIQVFLSL
NDKPIRFKITKCVVFPQSAGVFVLHPDIFEGSNIVIDIGGMTVDVSYFNDMTLQDYRTYE
LGMIKLYDKLVQNIKAEFGVSYDILNAEDIIKNKRIFRDGELIDCTDVVNTTLRTHASLIIN
RVMAGLSQYDTSQRHFIGGGSYILGEYLPVKAIKEDIYANAEAFFKIGVERFAS
gi|242262130|ref|ZP_04806818.1|StbA family protein [Clostridium
cellulovorans 743B]
(SEQ ID NO: 381)
MILGIDIGNYSVKTSTGVNFKSLVSTEENLLGSKIKIEFDNKTFYIGEGNRDTELDKASKE
SFLPLLYSAIALSSPAQYNKVVVGLPINQYKSRKAEIENKISKESNKKIILNDKERTLTITEF
KVYPEGVGAYQSLDSEEDMIIIDIGGRTTDIAYIFNGELKTTSTVNVGTLNIYKNIADQLN
SKFSIDIDVEKAEKIIKQGYLSIDNKTVDISFVSSVLRENFMKIKADLDFKFSAHTEKLML
TGGGAALFHKAFVNRYEDISIMQNPVLANVRGFKKVGELLWV
gi|242348095|ref|YP_002995656.1|hypothetical protein pRA1_0158
[Aeromonas hydrophila]
(SEQ ID NO: 382)
MSQFVLGLDIGYSNLKMAMGHKGGEARTVIMPVGAGPLELMPQQLTGGAGTSIQVVID
GEKWVAGVEPDRLQGWERELHGDYPSTNPYKALFYAALLMSEQKEIDVLVTGLPVSQY
MEVERREALKARLEGEHQITPKRSVAVKSVVVVPQPAGAYMDVVSSTKDEDLLEIIQGG
KTVVIDPGFFSVDWVALEEGEVRYHSSGTSLKAMSVLLQETDRLIQEDHGGAPGIEKIEK
AIRAGKGEIFLYGEKVSIKDYFKKASTKVAQNALIPMRKSMREDGMDADVVLLAGGGA
EAYQDAARELFPKSRIVLPEESVASNARGFWFCG
gi|251777976|ref|ZP_04820896.1|probable ATPase of HSP70 class, putative
[Clostridium botulinum E1 str. ‘BoNT E Beluga’]
(SEQ ID NO: 383)
MLIGVDLGNFGVNTSENDFFYSRISDISNFSEENKITYEGIDLYIGDGEFSTNWNKSQKEN
TMPLLFSALARSSNENFFQIVLGLPIQQYKSNKDEFKKYIEDNRGKTIIYKGIKREIIISDVL
IAPEGAAAYYNLSAEQKKLIGNKSLIIVDIGGRTTDVCMFQNKEIKKFKTIPTGMLNIYAD
IVTEVNNRFTESFKLEEGENILKEGLFLYGEKQDINFVKPILQRHFNSIYKDLQLNFELSK
GYVLLTGGGSLILKRPFENRLKNLIISKDPVFDNAKGFKKLGTSIWQEK
gi|251779917|ref|ZP_04822837.1|conserved hypothetical protein
[Clostridium botulinum E1 str. ‘BoNT E Beluga’]
(SEQ ID NO: 384)
MSEKIKVLVSIVDLGNYNVKGINQDGKKIDFKSNISKNYETFPDGFNYVLLDGEYTYFEK
GVFSKEYIKTNKDYTAQVLYAITKLHEDIEDIETNLTLLLPISEMEHKQKYIDELKGKTFE
YTVKASKKMEKTVKINDVLVIPEGYASYFTLEDEVKTSAVLLIDVGGRTSNVVAMNNG
KPQVLTTYKIGVLNFYSKLKKLNEDKEYNLEDIERLIKKGDITITQKQLATFTNDIINEIKI
DVNLNHYDNVVWTGGGSTVIEKVITENLPESCSLNKEPLYSNINGALEVSKITWGIKDG
KEEKK
gi|251780072|ref|ZP_04822992.1|phage uncharacterized protein, XkdX
family [Clostridium botulinum E1 str. ‘BoNT E Beluga’]
(SEQ ID NO: 385)
MENNNGLVRITVVDAGNYNMKYMGKGEMGSFSSKVSTDEQPFNDAYDRIEIDGKITYI
GQFGELSREYNKVDRNLLPQILFAICKANNDVDTITTNITTMLPILQMTNKSKIIEQLKSQ
NPFKVKVNGKDKTIFIKQVAVLPESFTSFYDMTKEQQKEDVCIVDCGSRTVNVCTFINN
GKLEKTATLKLGSLDFFKKVKSIEASKGKDYVEEDIERLINNGKITVAEKQYKDFFNEIL
NSIKADVNIDNYATYFTGGTAKMFQKYIPNGCKLFVNPLYSNLNGALKASELKWGKVV
NG
gi|251770901|gb|EES51487.1|conserved protein of unknown function
[Leptospirillum ferrodiazotrophum]
(SEQ ID NO: 386)
MKKAGQNKETLKIENIGLDDGYANIKLAWKDEDGTIRTKKVPSRAKAGSLGVGSLLDD
GPGAAMGYETEGERWTVAPGIEGESTRFPDYNLSSLARVLAHHALVSAGWGGKDVGIA
TGLPLDRYFRDGKRDDVRIARKIENFSKDVIRLDGGATARIVGHEVFAQGLAAVVDWL
VDDSDPREQIGPIGVVDIGGQTTDISVVSPGFQVDRGRVRTVDLGVLDVRDLLRRRLQSR
FDVYEISDGAIDAALAFGKIRVWNKEVDVIDDTAQVVREVESSLERNILSEFGKAASSFE
TILFVGGGSRIFRSLPARFPNAVVGPDPEFANARGLLKIRILNERLNKRGSRS
gi|251828787|ref|ZP_04831849.1|conserved hypothetical protein
[Gallionella ferruginea ES-2]
(SEQ ID NO: 387)
MLTVGLDIGYSNLKIVYGDNTEVSPKMIKRPAGAAPLDHLGQRIMGSDDSLHVLVDGK
EFAAAVSHDRIENWPRELHKDYTATESYRALFNAGLLLTEMSEIDCVVTGLPTNQYLDA
GLREHLTKIMRGEHQITPRRKVVVHEVKIVPQPLGGFVDWMHGLNDPSQIEDSSVLVVD
PGFFSVDWVLLVNGEFKRASSGTSLDATSVVLDEAAALIAKDHGGNPGRSKLENAVRA
ERSTVSVFGERIEIAPYLADASAKVGHIACSQIQESLRKENSSIDQIVLVGGGAPFFEASIK
EAFAKTPINLAKEAVFANARGFWRGGAA
gi|253576814|ref|ZP_04854140.1|conserved hypothetical protein
[Paenibacillus sp. oral taxon 786 str. D14]
(SEQ ID NO: 388)
MIGNVLFPRCEEVIMIRIAGIDVGNDSVKVVVDGSQRPIIIPSIVSPGYDRHVLQEEDSPLK
ALDVRVYSPKLKRNNQRYFVGLLAMEDQDNSELEETDNKATSDQSLVVALTALAYAA
LAGQTYPTTGTGIEEVEYILGTGLPVRTYVAFHKAFEERLTGEHEVTFLSTPELRGRTVRI
NIRRTIVSVEGAAALFHLATNDTLQVRNEELHNGCIGICEIGALTTDFPVVKRMNIDNQFS
TGEQFGLATYLDSIIRDVEDQFGYRFPSRTKLIGRIRNREFIIQRVGEGQADIRPIVDMYFS
RAAQKLVDLIRKRWKKYPDIECFYVLGGGAAALKSYLIEAAGPMRLRFEENSEILNVQG
YLKLAKNKAGQQPNPA
gi|253680878|ref|ZP_04861681.1|conserved hypothetical protein
[Clostridium botulinum D str. 1873]
(SEQ ID NO: 389)
MSKGNNIVDSFAVQVIDDGYADTKSRSENTNIIVTPSYVTSWRPSYNKDNDLKEGKVDK
LSRIEVNVNGSKFLVGECAVKQDRNIQWNGASDKHDDTSFDILLKTHLSLLNKKPMSRV
KLVMGLPVIASLDKERVDKMKAKVLRQHDVAMRLCGDKEFQNKIIKVEDLIIKAQPHG
TLCDLILDNSGNLTNKDLAKKVNAISDIGGKTHNLYLVDALEPLADFCDTKNSGMYLAY
MWIKNYIEQELHLSISDGQIQYIVASGHIKGYDLTPVIQKAYRSLARKIILEIRTVWENAFP
FIENIIFTGGGATVLKPYLQEEFKNAMYLTRNQNAAGLFKQGIRKWKRKAV
gi|254723117|ref|ZP_05184905.1|hypothetical protein BantA1_11669
[Bacillus anthracis str. A1055]
(SEQ ID NO: 390)
MKSLYAIDVGIGFTKRAYRQDEDSEVTVKSEASTLAPVPNHDESEDLTKVSFIDLDFAYY
MGNEAHQSDASFLPPFEEEIENYYESEQFKQQIFGCIAKDYKENVVLPLVVTGLPVTYFG
SQHEQLQRALKKETSVQIDGKFIHITVENALILQQPVALHAYFLKEGIIQERDRILIIDGGF
RTLEMTDMKQNVILNHYETELGCSKPLKNIKNIVQNHAGESDHLHINDMPNILEKGYGG
REEDPQTNQVHILIQKELDAHFQDVMRVLQEQFKLDQYDTIIWTGGIVDLHKKRIEKMQ
GEISSFRMVDASKEAALHGYYMIGSQVFDDITNQSVYESKL
gi|255257264|ref|ZP_05336707.1|conserved hypothetical protein
[Thermoanaerobacterium thermosaccharolyticum DSM 571]
(SEQ ID NO: 391)
MFKIGLDLGYGYTKGINESDKTVVFPSIVGNAYERNLKGLFESSFEKRIDNMHIVIMNGE
RHEFFVGELARREGRNVSYAFDENKINHPNTKALIAASCLLLFPEDGSPVHLVTGLPLEQ
YIHKKDEFLEMLKGYRNLGCFKGDEKVKTIKFDKVTIFPQAAGAVYSAIMEDLHRYLIK
GSYLGLVDIGFKTTDFIVFLVEDRLILREDLSGTIDVGISSIYNSIDKLFIQKTGSKLDVPEL
MRLAKDERIFFRGRQIDFGDEIKSIKAEIARVIKDRLKAVWGNKLDFFNTIFLAGGGAKD
LQEFLVDIYDNAVIVKDPQMANAKGFLKVAELEEKKNN
gi|255683548|gb|ACU27363.1|Alp7A [Bacillus subtilis]
(SEQ ID NO: 392)
MNISRMNVDFGNSMYMNLIDGYFFELPTNVVEISKEAAEGKFTSIVEDPADLKDRLLVS
TVIDETERYFLVGELAEPEVLGNQHIKKLHNKVESHIPYVTFLAATAYYQALKGKREDN
EVTIEYFQTMLPIWLLKKLDKFSEMQKRMASKFLGTHQVKVLTLGLEKELTIKVEDAAC
RIESEVARWAIKKNFDLEDKDYAEQFKNYDVVFCDLGGGTDDLVLLPAGLKPPKSRDSF
VSNTEAPFLAHLEKLRKEKLLEHFDSVRELEKFIYSNIGKTKMERRDGNTGQKFDLTDII
KKSLKEYTEIKIAQAENTFPAPKDKVYKYLYFGGVGEVLEESISVVTEERYGRDISESNHI
VAEDARLLNLYGLEVLSRAEQVKKQANEKEAQSI
gi|258624154|ref|ZP_05719104.1|hypothetical protein VMB_04050 [Vibrio
mimicus VM603]
(SEQ ID NO: 393)
MSQFVLGLDIGYSNLKMAMGHKGEEARTIVMPVGAGPLELMPQQLTGGAGASIQVVID
GEKWVAGVEPDRLQGWERELHGDYPSTNPYKALFYAALLMSEQKEIDVLVTGLPVSQY
MEVERREALKARLEGEHQITPKRSVAVKSVVVVPQPAGAYMDVVSSTKDEDLLEIIQGG
KTVVIDPGFFSVDWVALEEGEVRYHSSGTSLKAMSVLLQETDRLIQEDHGGAPGIEKIEK
AIRAGKAEIFLYGEKVSIKDYFKKASTKVAQNALIPMRKSMREDGMDADVVLLAGGGA
EAYQDAAKELFPKSRIVLPNESVASNARGFWFCG
gi|259503757|ref|ZP_05746659.1|conserved hypothetical protein
[Lactobacillus antri DSM 16041]
(SEQ ID NO: 394)
MQYSAKQGEQPMEIFSLDLGNKQTKLKSSKSEYVLPSRYLNQADMPMSVGSSTTNNDL
HIYSVPFSDDKYVWGRDIDGLHLDEYLADTIMYGNRYNSEAFKLLANFALGLLASDFKI
ANNQVLEVVVTAGLPTGDYADQERLRSLLKVLEGQHQVTIDDQIVTVRVRKVYILPQPI
GTLYNELLDNQGFIKNKALLDEKVGIVDVGGGTILIDTILNFELSGKNRHQFNTGVNDLY
EAIASRIEGDVSLYQLEKELRHGNQQHQWSYRFSKNRQDDITELVGKESDRFTRRLVAN
VTSTLKNLDSIDTLFFTGGGANLINQKILKTTFTNAAIVKDTEVANVNGFYKYGLSQQVQ
EKEGK
gi|259156533|gb|ACV96477.1|conserved hypothetical protein [Vibrio
cholerae Mex1]
(SEQ ID NO: 395)
MFVLGVDIGYSNLKLAIGQSGSEPKTIILPAGAGPADRMPERIGGGDDETCLYVSVDNER
WAAGVPAGRLQGWERELHPEYPTTKTYKALFHAALLMAETESIDLVVTGLPVSQFHEP
QRKSDLVQRLKGVHQVTPKRSITVHDVRVLPQPAGAYMDLVQTGGDLGLIEEGRVVVI
DPGFFSVDWVALEAGEIRYSSSGTSLQAMSVLLETIDKLISEDHGAKVGMDRLEKAMRT
SDLQVLLFGEKVDISPYLNAAMKKVAPVALTAMRQSMRDESINADLVLIAGGGAMAY
KEAAKEIFSRSKIIVPEQSVLANVRGFWFYGA
gi|260102319|ref|ZP_05752556.1|conserved hypothetical protein
[Lactobacillus helveticus DSM 20075]
(SEQ ID NO: 396)
MWYSVYTQNNAIQGECFMDIFSLDLGNKQTKLKSSKAEYVLPSRYLNQADMPMSVGN
STMNNDLHTYSVPFSDDKYVWGRDIDRLHLDEYLADTIMYGARYNSEAFKLLANFALG
LLASDFKAAKDQVLEVVVTAGLPTGDYADQGQLKALLKVLEGQHQVTIDDKIVTVRVR
KVYILPQPIGTLYNELLDDEGFIQNKNLLDEKVGIVDVGGGTILIDTILNFELSGKNRHQF
NTGVNDLYEAIANGINGDTSLYQLEKDLRKGNQQHHWSYRFSKNRQDDITDLVCKEID
RFTRRLVANVTSTLKNLNSIDTLFFTGGGANLLNQKILNTTFTNAVIVKNTEVANVNGFY
KYGLSQQAKNEGGK
gi|260892708|ref|YP_003238805.1|hypothetical protein Adeg_0813
[Ammonifex degensii KC4]
(SEQ ID NO: 397)
MKVAIDVGYGFVKGVAGSGERVRFPSVVAPAQELVLSDLAGREVGHLVELRRLSGAVE
RYFVGELALKEGRAQAVTLDRDKHLHPYHSVLLLAAARLLGAGSSAELCVGLPVAYYR
PRREELKRHLMGLSAEVSVDGSPAARVSFSRVLVYPQGAGALLTAADLPESGLTVTVD
VGFKTTDFVTCEVQDGKALPVSSLCGSLEVGVHTALYLVQAAYQARTGAPLDFTRAER
LLREGRTFFRGEELDFSREAEMARLAAARSIADGVLAVLGSRADEVAVYYLAGGGAEA
LPQLRQMLPGRVRVLPDPTFANALGFLKVLSGSA
gi|282898898|ref|ZP_06306882.1|conserved hypothetical protein
[Cylindrospermopsis raciborskii CS-505]
(SEQ ID NO: 398)
MTEPTPAANPINLAAVPMNSGISKQTVSSISLTHKPTSSSGKNILSVDLGRTSTKTCVSRE
PGTVAFIPANVKHMSTEQIRSGVFESKTADPIIDLWLEYQGSGYAVGQLAADFGANLGV
GKSKVEDALVKVLAAVGYFKLQGEISVVLGLPFLSLEQFEKEKAQLVSLLTGPHTVKFR
GESLLISITKVWVMPEGYGSLLWTESQPNKSPLVPDLTTISVGIVDIGHQTIDLIMVDNFR
FARGLSQSEDFAMSEFYQRVAGEIEGADSQSLALISAVNKPKGERFYRPKGATKPTNLD
DFLPNLTEQFSREICSRVLAWLPDRVTDVIITGGGGEFFWADIQRLLKEARINAYLAAPSR
EANALGQYLYGEAQLSTSRVANQ
gi|282898087|ref|ZP_06306082.1|conserved hypothetical protein
[Raphidiopsis brookii D9]
(SEQ ID NO: 399)
MTESTPVANPINLAAVPMNSGISRPTVPSISSAHKPTTTSGKNILSVDLGRTSTKTCITREP
GTVVFIPSNVKHMSAEQIRSGVFESKTADPLMDLWLEYQGSGYAAGQLAADFGADLGV
GKSKVEDALIKVLAAAGYFKLQEEISVVLGLPFLSLEQFEKEKAQLISLLTGQHIVNFRGE
SISVSITKVWVMPEGYGSLLWTESQPNKSPLVPDLTKISVGIVDIGHQTIDLIMVDHFRFA
RGLSQSEDFGMSEFYQRVAGEIEGADSQSLALISAVNKPKGERFYRPKGVTKPTNLDDV
LPNLTEQFSREICSRVLAWLPDRVTDVIITGGGGEFFWGDIQRLLKEAKINAYLAAPSRE
ANALGQYLYGEAQLSSSRGVARQ
gi|281491857|ref|YP_003353837.1|hypothetical protein LLKF_1403
[Lactococcus lactis subsp. lactis KF147]
(SEQ ID NO: 400)
MNIFAIDLGNKRIKMKSEKGEYSYPSSYLNAEQVATGGLGSESVEQNFVFKIPQDAKNSF
IWGPNLEVYNLPERMIDTYARSGRMKQKKAIRILEFALGRLAMDYPEAYESPLVVHLTL
GLSITDMHEESDTIDVLKKLAIGQHQILIDGRVLTIIIPTEEFLSIIPQYMGTVLNLAFDEEY
QRNQRFSDGKIGVIDIGGGTILINRSVGLNPSPNGDERFEGIQNLIKEIGRRINSTKPFLIEQ
MLRSADDKGNYNYRPNSNRQDSRDITSVVRGEIERYTRFTVAPLVTENFPDIEEIDFIVVT
GGGASLLAKEALKDEIGEEYFERLFFLNESEFANVRGFYKGGYLKWHISNDDSLQIKNSL
EKVQTSLTNFEAFQDEKELVIPSNETINTLRSQEVLEAQKKLQALESEIEGIKLEFED
gi|283846962|ref|ZP_06364418.1|hypothetical protein BcellDRAFT_2920
[Bacillus cellulosilyticus DSM 2522]
(SEQ ID NO: 401)
MKEQILIAVDCGKYQTKGIARYRGKTFMVSFRTKMMPVSRLGVDIQPNSFLVEYLGNE
YLIGNMVSEDFVDYSLTKNSTIHQISIYTAISQLLQKANAPANVDIRLAVNVPISTYKDSV
QKDSFKQMVENRRGSIHLLVNGRTHSFELSDVTLAFEGMGEVYSKPDVYKDKNTIVVD
LGGLNTTLCTFSGIQPLVNTMIVSDLGINVLKGRIGKAINERYGLSVSADDLEQVLRSGY
FASKGEVFEESKVFIEELKYDHVQQIIRFARSRGYTFNMSDIHFVGGGAIILKRYIKQEFP
HAVILDNPQYSNCLSFLKILEVKYAKH
gi|284051383|ref|ZP_06381593.1|hypothetical protein AplaP_07907
[Arthrospira platensis str. Paraca]
(SEQ ID NO: 402)
MQSNKQPGQSQSQSPLAKATTTKPTTTTVVGRSTILSVDLGRTATKSCISRNPADVVFIPS
NVAQLSVEKARGGGFESKNTDPLLDLWLEYQGNGFAVGQLAADFGASLFGVDPAANP
SKVNDALIKIFACVGYFNLKGDLDVVLGLPFYSQEQFEREKEQIMSLLSGPNTLVFRGEQ
VVVDIQSVRVMPEGYGSLIWCEAQGSKDMPNFADLSVAIVDVGHQTTDFLTVDRFRFA
RGVSQSEVFAMSKFYEEVAAKIEGADAQSLFLLEAVHKPQGQRFYRPRGATKPANLDEI
VPELRKIFARDLCDRVVKWLPERVTDVVITGGGGEFFWQDLQPLLKEAQLRAHLTQPA
RKANSLGQYVYGEAQLAKR
gi|288796993|ref|ZP_06402566.1|StbA family protein [bacterium S5]
(SEQ ID NO: 403)
MKCIGQDIGFGDVKTVIEDQMLKTPTAIAYEGFGARVDLDGPTSIEFEGQNYLVGEDAIE
SGQPVFETTSIDFLLRYAPLLAYHAIKAAGFDFDEKIHLGVGLPVSYYTPENKAALANRL
NTAVVNKERLQLNTLVYPQGVGAFYDYRLTTNEKISSALIVDIGYNTVDVVHISKGRPN
KSGSGMFDRAGISVIIRELSRFISDRHQIQLSNQVIKEIFISKKLSLYGKEISLEEPIRQIVER
YTTHLLHSLEDGYHQQLAQAQKIVITGGVAHYLQHYIPTKMQESIVIPESPEFANARGFY
KVLIASISDSENVDA
gi|288554535|ref|YP_003426470.1|hypothetical protein BpOF4_07600
[Bacillus pseudofirmus OF4]
(SEQ ID NO: 404)
MTKSRIAAIDVGNDSVKALFGKADFELNIPNVIARDTEDRPVIGIEELNDKDPLEGIHIRV
HSPALNDNNAIYRVGNLATKSDNATELDPGSSKSEEDQTLVMLFATLALDAVRAENGE
LFKKSNQVIDANYTLGTGLPLREVKEGKDVGYRSQLLSSVHQVEFLVTPKYQGLKVNIR
FDQVKVYPEGFAAYINLVMDKDLNIINRDLVDKRILIQDIGGLSTDIAVIKNRNVDDDKA
QGFNLGVSESLEAIREEIRTKHGVELDTRRDVVEVITKKQDRNHIMVKGSRTSVHDITDR
ILFELAKKQYRHLRNVWQKNSQTEICYFVGGGAMVLKEYLKTLNNNLDGYNIAFFEDE
KESIWMMANAYYKLIADFDRKNNQVAAAKDPQSHQEKKAAKK
gi|288557196|ref|YP_003429263.1|hypothetical protein BpOF4_21879
[Bacillus pseudofirmus OF4]
(SEQ ID NO: 405)
MIVMNMNVANDNGNNEQAIKVNDVLYRQPNTYAMPERPSFEDNSEPETLIPNLLNELE
VDIQSDSIDFGGLYFIGRKAIKSKYTAHSMSVDSEKKYESDLPIINTLGLLSGVAVQNAY
KESKELPKEISLNVDMATALPVNQWSRETASFFSKRFMEGLHTVIVYVGHLKVRVSMKF
TYVKVIPEGTPVLFNLIEDQEGNYRNDSIFDEFKKEYEVNVDGEYFQDKRIKHVDIGDGT
CDTPLTIGYEYDRDFVNGIPTGIGHSINKAIDLFKKEVSDMNISRQQFIDYVKEEGHPYHD
KAVRLIKQSMRSEVKSIHDHIVDELKKASNEVDIICVYGGGSILMKDHLYKPLKKLCDRP
DIPAKLLWVPEQFAPLMNVEGLNIFLKAVLPQLKEKELASK
gi|289176854|emb|CBJ93023.1|conserved hypothetical protein [Xenorhabdus
nematophila ATCC 19061]
(SEQ ID NO: 406)
MGNYRGYTGRSQAVFSLQQEENNRKAIKKQSLEDFMNQFVMGLDIGYSNLKMAMGH
KGEEARTVVMPVGAGPLELMPQQLTGGAGTCIQVVIDGEKWVAGVEPDRLQGWEREL
HGDYPSTKPYKALFYAALLMSEQKEIDVLVTGLPVSQYMEAELREALKARLEGEHQITP
KRTVTVKSVVVVPQPAGAYMDIVSSTKDDDLLEIIQGGKTVVIDPGFFSVDWVALEEGE
VRYHSSGTSLKAMSMLLQETNRLIQEDHGGAPGIEKIEKAIRAGKTEIFLYGEKVSIKDYF
KKASAKVAQNALVPMRKSMREDGMDADVVLLAGGGAEAYQDAAKELFPKSRIVLPKE
SVASNARGFWYCG
gi|289635834|ref|ZP_06468118.1|conserved hypothetical protein
[Burkholderia sp. CCGE1003]
(SEQ ID NO: 407)
MKVSAFGVDIGYGHTKVALRTGSEISTASFPSLAPLVPHLELSRTRERVADGLNVVLIEV
QGSHYAVGPEVESLPACSSLTRTSLDSFCLTPMYTALLGGALYRAGATEIECMVLGLPA
RFSWVYFRYLRDAFTGALDFGQGVIHVGSVDVVPPLLGSLGTFANSGDGRFDPEHGHLL
IDVGYSETSWLLYCDHKIVPQCSGHVRGGAWQVYRTIGSLIANRERCPVDNMERIGRCL
SDKKPLLHYGKDIDLAPLVESSQAVVSAAFEIIRDRTPSPSRLKSIVLTGGGASLYETAIR
AAFPRVRIDILDAPSHANAKGFLLLGEAQLAGRKLVPTSA
gi|291279120|ref|YP_003495955.1|hypothetical protein DEFDS_0720
[Deferribacter desulfuricans SSM1]
(SEQ ID NO: 408)
MRKVISIDIGFGSTKVAFNEGSGLRLEKFPTAIAPIPSSNHFNDNFYQEDKHFYFEGQLYT
VGDAAKADAIVTTSYEFLHKYSPLILYYIIEKFNIDYSNAVFALGLPLSYYTNDKINEMSN
RLKSFTVNDVEISIDVKILVQGVGCLFDYLSTNQSNVKNGIVVDIGYNTIEFIVIQNGKVK
KADSRGLVKKGMNMLIVKLQQEIQSKYALELTEHEAVSALEDESINLYGNKIPLKEDIIK
LKKWYTDTVIQNLIGMYDDKNKEI
gi|291529699|emb|CBK95285.1|hypothetical protein [Eubacterium rectale
M104/1]
(SEQ ID NO: 409)
METSIFATKSEIREHKNPSFGNVHIIGLDMGYSGVKCFHENGNFVFPNYCQKIEGEIFGDL
SRNDLIYEDLKSGDRYYVGALAIKSLSEDSTVAEDKILGRNHYGHMDFLIKFRTALGLA
RWDIPEDEPLFIQTGLPPAYIKTDEMLLRNAIQQSHDFALISCGKRKEFHIDITAEDVDVM
YQPMGTFYSVTTDQFGNLTNDLKTFRNSDLLVFDCGFKTLDKFVIQNKKLEEKDTDENL
GMKRILEETRNSMQEDLKKKGYSVSVSLPAMQQCLKNGVVRINDRINFTVKEFPIEEYL
KKANELICKEAFDSIKDYVFSIKYLIMTGGTGSAWYGYFKDKLKGIHTLKVISGDYNSNL
PAFYANARGYYMYRLTQFKVKR

The application's sequence listing, which the Patent Office published only in electronic form, follows.

SEQUENCE LISTING (420 sequences)

SEQ ID NO: 1 - protein, 391 aa, Bacillus subtilis
MNISRMNVDFGNSMYMNLIDGYFFELPTNVVEISKEAAEGKFTSIVEDPADLKDRLLVSTVIDETERYFLVGELAEPEVLGNQHIKKLHNKVESHIPYVTFLAATAYYQALKGKREDNEVTIEYFQTMLPIWLLKKLDKFSEMQKRMASKFLGTHQVKVLTLGLEKELTIKVEDAACRIESEVARWAIKKNFDLEDKDYAEQFKNYDVVFCDLGGGTDDLVLLPAGLKPPKSRDSFVSNTEAPFLAHLEKLRKEKLLEHFDSVRELEKFIYSNIGKTKMERRDGNTGQKFDLTDIIKKSLKEYTEIKIAQAENTFPAPKDKVYKYLYFGGVGEVLEESISVVTEERYGRDISESNHIVAEDARLLNLYGLEVLSRAEQVKKQANEKEAQSI

SEQ ID NO: 2 - protein, 388 aa, Bthuringiensis serovar israelensis ATCC 35646
MKITMMNKDSGNSLDMNLIDGFYIETPTNVVEISKDEADSHFVATITNPKELLSRLLISTTIPGEDTERFFLVGDEAGKHALANNHVNKLHDKITSPIPYVMFLSAVSFYHAINETRESDDNTVEIEYFQTMLPIWLLKRTAKFSEAQNAMAERFAGEHEVTIHTPGMEKTLKITVEKATCRIEGEIARLAIKKNFELEDREEARQFDNNDTVLVDIGGGTIDLVLSPAGLKSPKNRDSMQPIDKLSYLSHIEKLRKEKFLEKFSDLRSFETFIVNNFQKPKMELVDGNTGQRVDLTDKIRSSLKEFAKFLILKIQDVMPAPADKVYKYVYFGGVAPILETSIHEVIEEMYGAEIAQANHIFLPDSRKLNLYGLEVKSRGEMLQKTEK

SEQ ID NO: 3 - protein, 369 aa, Bacillus megaterium
MRCIDMKISRFNKDCGNSVDMNIIDGYLFDFPTNVVELQKEAADSFFTDAVTAPEEFKKRILLSTTIGDEEKERYFLVGDIAASQQLANNHINRLHNKITSHIPYVTFLAAIAYYNALHAKDQKDTSIEIDYFSTMLPIWLLKKESTFGEAQKAMANRFVGDHTFHIHTPGFERELKVSVEESSCLKEGEIARFALKKDLTLQDREDANEYVECETVMVDIGGGSIDVVILPEGLKAANSRESFQSIEGIPYLAHIDKLRKEKFPELFTDLRAFDQFILDNYNKQKFELKNENTGESIDLTVQIKSSLKEYVEILLAKLNDVAPPPANKLRKYVYCGGVAPTLEVAIMNSMGEKIGEERTEKYHKVPET

SEQ ID NO: 4 - protein, 407 aa, Bacillus thuringiensis
MKIGRKVADFGNSFNNFTVDGYYFELATNVVKVSKKKAEDLLVERILNPEDLLDRLLISTEIDGEESYYVLGQLAEDNQLANSHVNKMHDKIKSPIPYISFLGAIAYYHALNADKEDDEVEIDYMSMMLPIWLLKREEKFSIAHKMMEQRFIGEHKVKVLTPGMERELTITVNSAKCRNESEIARHSLKYKMVAKDKNSNVISIEKRLEAEKFDDFEVVLTDIGGGSTDAVRLGKGLTTPKHRDSFQVIDIEPFLGYIDRFRKEKVLQYFKDLRTLETFIVKNYKDQEYVLIDENTGQEHDFTSEIVEALQEYAKILVAKVLDVFIPSSTNTVLKFIYIGGEAPVLEPYIRLALLEHMNETAAKNNHFFLSDIIKHDEKEIFAPTSRTINLAALELKAIDETKEQLA

SEQ ID NO: 5 - protein, 409 aa, Clostridium acetobutylicum
MNIKRFNADFGNSTGNFLIDGYYFEIPTNIVEISSKKAEGMFVSPITEKNELLDRLMISTGEKENEKFYLVGEFAQGHEIKTHVNQMNDKLTSIIPYANFLGAVAYYAILKNPSEEKEINVEIDNMKMMLPIWILKKASKFSVAQNQMAARFLGEHTVKVLTMGMERIIKIKVNNSVCKIESEVARYAIKYKMVQEDKIIKILPRANLSDKFTKCETVLCDFGGGSIDCVKLGEGLTPPKARDSFKVIDIEPFLGWLETFRKEKVLQYFYSIKQIEKFLINNYKKQKYILEDPNTGKSYDFTSKFTEMLQDYSDKLVPVIFNTFKETDRLLKFVYFGGESPVLKPYIKKTLLKFVTEKVAEENHIFLDDLLENDTSEVFKPTSRTINLTALELLSISEVTKNKSSEKNE

SEQ ID NO: 6 - protein, 388 aa, Bacillus cereus AH621
MKINMMNKDSGNSLDMNLIDGFYIETPTNVVEISKDEADSHFVATITNPKELLSRLLISTTIPGEDTERFFLVGDEAAKHALANNHVNKLHDKITSPIPYVMFLSAISFYHAINEQRESDDNTIEIEYFQTMLPIWLLKRTAKFSEAQNAMAERFAGEHEVTIHTPGMEKTLKITVEKATCRIEGEIARLAIKKNFELEDREEASQFDNNDTVLVDIGGGTIDLVLSPVGLKSPKNRDSMQPIDKLSYLSHIEKLRKEKFLEKFSDLRSFETFIVNNFQKPKMELVDGNTGQRVDLTDKVRSSLKEFAKFLILKIQDVMPAPADKVYKYVYFGGVAPILEASIHEVIEEMYGAEIAQANHIFLPDSRKLNLYGLEVKSRGEMLQKTEK

SEQ ID NO: 7 - protein, 384 aa, Bacillus cereus BDRD-ST26
MMNKDSGNSLDMNLIDGFYIETPTNVVEISKDEADSHFVATITNPKELLSRLLISTTIPGEDTERFFLVGDEAGKHALANNHVNKLHDKITSPIPYVMFLSAVSFYHAINETRESDDNTVEIEYFQTMLPIWLLKRTAKFSEAQNAMAERFAGEHEVTIHTPGMEKTLKITVEKATCRIEGEIARLAIKKNFELEDREEARQFDNNDTVLVDIGGGTIDLVLSPAGLKSPKNRDSMQPIDKLSYLSHIEKLRKEKFLEKFSDLRSFETFIVNNFQKPKMELVDGNTGQRVDLTEKIRSSLKEFAKFLILKIQDVMPAPADKVYKYVYFGGVAPILETSIHEVIEEMYGAEIAQANHIFLPDSRKLNLYGLEVKSRGEMLQKTEK

SEQ ID NO: 8 - protein, 388 aa, Bacillus cereus Rock3-29
MKITMMNKDSGNSLDMNLIDGFYIETPTNVVEISKDEADSHFVATITNPKELLSRLLISTKIPGEDTERFFLVGDEAAKHALANNHVNKLHDKITSPIPYVMFLSAVSFYHAINEQRESDDNTIEIEYFQTMLPIWLLKRTAKFSEAQNAMAERFAGEHEVTIHTPGMEKTLKITVEKATCRIEGEIARLAIKKNFELEDREEARQFDNNDTVLVDIGGGTIDLVLSPTGLKSPKNRDSMQPIDKLSYLSHIEKLRKEKFLEKFSDLRSFETFIVNNFQKPKMELVDGNTGQRVDLTDKVRSSLKEFAKFLILKIQDVMPAPADKVYKYVYFGGVAPILETSIHEVIEEMYGAEIAQANHIFLPDSRKLNLYGLEVKSRGEMLQKIER

SEQ ID NO: 9 - protein, 373 aa, Bacillus cereus Rock4-2
MNLIDGFYIETPTNVVEISKDEADSHFVATITNPKELLSRLLISTTIPGEDTERFFLVGDEAGKHALANNHVNKLHDKITSPIPYVMFLSAISFYHAINETRESDDNTIEIEYFQTMLPIWLLKRTAKFSEAQNAMAERFAGEHEVTIHTPGMEKTLKITVERATCRIEGEIARLAIKKNFELEDREEARQFDNNDTVLVDIGGGTIDLVLSPAGLKSPKNRDSMQPIDKLSYLSHIEKLRKEKFLEKFSDLRSFETFIVNNFQKPKMELIDGNTGQRVDLTDKIRSSLKEFAKFLILKIQDVMPAPADKVYKYVYFGGVAPILETSIHEVIEEMYGAEIAQANHIFLPDSRKLNLYGLEVKSRGEMLQKTEK

SEQ ID NO: 10 - protein, 407 aa, Bacillus mycoides Rock1-4
MKIGRKVADFGNSFNNFMVDGYYIELATNVVKISKKKAEDLLVDRISRPEDLLDRLLISTEIDGEESFYLVGQLAEDNQLANSHVNKMHDKINSPIPYISFLGAIAYYHALNAEQEDNVVEIENMSMMLPIWLLKREEKFSIAHKKMEERFTGEHKVKVLTPGMERELTITVNSAKCKNESEVARHSLKYKMVSKDKNTSVISIEKRYESERFDDYEVVLTDIGGGSTDAVRLGKGLTTPKHRDSFQVIDVEPFLGYLERFRKEKLIQYFKDLRTLEKFIVNNYKEQKYVLSNENTGEEYDFTTEIVEALKEYARILVAKVLDVFIPSSTNTVLKFIYIGGEAPVLEPYIRLALLDHMSETAAKNNHFFLNDIIQNSEKEVFAPTSRTINLAALELKAIDEMKGQLA

SEQ ID NO: 11 - protein, 407 aa, Bacillus pseudomycoides DSM 12442
MKIGRKVADFGNSFNNFMVDGYYIELATNVVKISKKQAEDLLVDRISRPEDLLDRLLISTEIEGEESFYLVGQLAEDNQLANSHVNKMHDKINSPIPYVSFLGAIAYYHALNAEQEDNEVEIEHMSMMLPIWLLKREEKFSIAHKKMEERFIGEHKVKVLTPGMEKELTIRVNSAKCRNESEVARHSLKYKMVSKDQNTNVISIEKRYESERFDDYEVVLTDIGGGSTDAVRLGKGLTTPKHRDSFQVIDIEPFLGYLERFRKEKLIQYFKDLRTLEKFIVNNYKVQKYVLSNENTGEEYDFTNEIVEALKEYARILVAKILDVFIPSSTNTVLKFIYIGGEAPVLEPYIRLALLNHMSEMAAKNNHFFLNDIIQNSDKEVFAPTSRTINLTALELKVIDEMKGQLA

SEQ ID NO: 12 - protein, 384 aa, Bacillus thuringiensi sserovar pakistani str. T131
MMNKDAGNSLDMNLIDGFYIETPTNVVEISKDEANSHFVATITNPKELLSRLLISTTIPEEDTERFFLVGDEASKHALANNHVNKLHDKTTSPIPYIMFLSAISFYHAINETRESDENTIEIEYFQTMLPIWLLKRTAKFSEAQHAMAARFTGEHEVTIHTPGMEKTLKIIVEKAICRIEGEIARLAIKKNFELEDREEARQFDDNDTVLVDIGGGTIDLVLSPAGLKSPKNRDSMQPIDKLSYLSHIEKLRKEKFLEKFSDLRSFETFIVNNYQKPKMELVDGNTGQRIDLTEKIQSSLKEFARFLILKIQDVIPAPSDKVYKYVYFGGVAPILKTNIHEVIEEMYGAEIAQANHIFLPDSRKLNLYGLEIKSRGEMLQKTKK

SEQ ID NO: 13 - protein, 388 aa, Bacillus thuringiensi sserovar andalousiensis BGSW
MKINMMNKDSGNSLDMNLIDGFYIETPTNVVEISRDEADSHFVASITNPKELLSRLLISTTIPGEDNERFFLVGDEAAKHALANNHVNKLHDKITSPIPYIMFLSAISFYHAINEQREPDDNTVEIKYFQTMLPIWLLKRTAKFSEAQNAMAERFAGEHEVTIHTPGMGKTLKITVEKATCRIEGEIARLAIKKNFELEDREEARQFDNNDTVLVDIGGGTIDLVLSPAGLKSPKNRDSMQSIDKLSYLSHIEKLRKEKFLEKFSDLRSFETFIVNNFQKPKMELIDGNTGQRIDLTDKLRSSLKEFAKFLILKIQDVMPAPADKIYKYVYFGGVAPILETSIHEVIEEMYGTEIAQANHIFLPDSRKLNLYGLEVKSRGEILQKTEN

SEQ ID NO: 14 - protein, 384 aa, Bacillus thuringiensis IBL 4222
MMNKDSGNSLDMNLIDGFYIETPTNVVEISKDEADSHFVATITNPKELLSRLLISTTIPGEDTERFFLVGDEAGKHALANNHVNKLHDKITSPIPYVMFLSAVSFYHAINETRESDDNTVEIEYFQTMLPIWLLKRTAKFSEAQNAMAERFAGEHEVTIHTPGMEKTLKITVEKATCRIEGEIARLAIKKNFELEDREEARQFDNNDTVLVDIGGGTIDLVLSPAGLKSPKNRDSMQPIDKLSYLSHIEKLRKEKFLEKFSDLRSFETFIVNNFQKPKMELVDGNTGQRVDLTDKIRSSLKEFAKFLILKIQDVMPAPADKVYKYVYFGGVAPILETSIHEVIEEMYGAEIAQANHIFLPDSRKLNLYGLEVKSRGEMLQKTEK

SEQ ID NO: 15 - protein, 360 aa, Magnetospirillum gryphiswaldense
MWIDLLARERSDKMSEGEGQAKNRLFLGIDLGTSHTAVMTSRGKKFLLKSVVGYPKDVIGLKLLGRPYVVGDEAFEMRSYLDLRYPLQDGVLSEISDRDIEVARHLLTHVVKSAEPGANDEICAVIGVPARASGANKALLLKMAQEVVHTALVVSEPFMVGYGLDKLNNTIIVDIGAGTTDICALKGTVPGPEDQVTLTKAGNYLDERLQNAILERHPELQMNTNVACAVKEQFSFVGARGEAATFEFRAAGKPVRCDVTESVKIACEALMPDIIESIEILLRSFQPEYQATVLQNIVFAGGGSRIRGLAAYVKDKLRPFGNADVTCVKDPTFDGCRGALRLAEELPPQYWCQLGDVSGQ

SEQ ID NO: 16 - protein, 347 aa, Magnetospirillum magneticum AMB-1
MSEGEGQAKNRLFLGIDLGTSHTAVMSSRGKKFLLKSVVGYPKDVIGLKLLGRPYVVGDEAFEMRSYLDIRYPLQDGVLSEISDRDIEVARHLLTHVVKSAEPGPNDEICAVIGVPARASAANKALLLKMAQEVVHTALVVSEPFMVGYGLDKLINTIIVDIGAGTTDICALKGTVPGPEDQVTLTKAGNYVDERLQNAILERHPELQMNVNVACAVKEQFSFVGTPTEVASFEFRAAGKPVRADVTEPVKIACEALMPDIIESIETLLRSFQPEYQATVLQNIVFAGGGSRIRGLAAYVKEKLRPFGDANVTCVKDPTFDGCRGALRLAEELPPQYWRQLGDVSGS

SEQ ID NO: 17 - protein, 322 aa, Magnetospirillum magnetotacticum MS-1
MSSRGKKFLLKSVVGYPKDVIGLKLLGRPYVVGDEAFEMRSYLDIRYPLQDGVLSEISDRDIEVARHLLTHVVKSAEPGPNDEICAVIGVPARASAANKALLLKMAQEVVHTALVVSEPFMVGYGLDKLINTIIVDIGAGTTDICALKGTVPGPEDQVTLTKAGNYVDERLQNAILERHPELQMNVNVACAVKEQFSFVGTPTEVASFEFRAAGKPVRADVTEPVKIACEALMPDIIESIETLLRSFQPEYQATVLQNIVFAGGGSRIRGLAAYVKEKLRPFGDANVTCVKDPTFDGCRGALRLAEELPPQYWRQLGDVSGS

SEQ ID NO: 18 - protein, 346 aa, Magnetococcus sp. MC-1
MQSPAGNDKQLFVGIDLGTSRTAIMTRRGVKTMVRSVVGYPKDIIGVKILNNTVVIGQEALDNQAYLNLYYPLADGVLKETSEKDEMAAKELLKYVISQAKPQGDEQILGIVGVPARTSIYNKSQLLKITDDLMSMSMVVSEPFMVAYGLDKLNNAIIIDIGAGTIDICAMKGTVPSDKDQITLLKGGNYVDEVFTHAIAESYPDVQITSYIAQKIKEKHGFVGEPTEEVVVNLRAGGKPMLHDVTRELRFACETIIPDILESVEKLVLSFDPDNQQEALKNIILAGGGSNLIGLDTVLTEGLKEYGKVNVSRVADPDFAGAAGALKLATELPTEYWNQVGDIVGG

SEQ ID NO: 19 - protein, 385 aa, delta proteobacteriumMLMS-1
MALADDEQVNDEINETASAIDDNPAPATDQPEFPAEVERPTPAGGGEQVTVGIDLGTCRTVVITDHGQEFEIRSVVGYPKDVISRQAVGDGPIFGAEALDKRNFLELCSPLAEGVVREASERDYRAARELIHHLIDLVRAGNPGVRVNGVIGVPARASLMNKEVLLGVAREVMDRALVVSEPFMVAYALGRLNRAIIVDIGAGTVDICGVKGSLPAAEDQVTTFKGGDYLDERLEAAIIRRHPGAQVTHSLACRLKEEHAFVGEPEKPVEVTLRVEGKPVQFDITDEMRTICESMVPNIIEQLEVLIASFDPEDQEEVLRHIYLAGGGSRIRGLDAMIARGLREYGEVRVTRVDDPERIGAIGALKLAREIPTNQWAQVGLMFGG

SEQ ID NO: 20 - protein, 390 aa, deltaproteobacteriumMLMS-1
MSETEAEDRPLLLGIDLGVARTAVVSNRGARHLLDSVVGYPRDIIALKTLGAPQIFGARALEHKAALTLYHPLGDGTIAQDRRRDYNAAGELLRHVIELATNSAPPRANVTDHGVHGVSGHGGPQAAASETAMRTSVPEPARSPLSAVPRDRLRVSGVIAVPATFGAGGRQTLATIAGELLADFLIIEQPLPVAYYLGRLDNSLLIDIGAGSISLCPCRGRLPNPNERVTLPKGGDSLDQRLQALISQRYPEVQITRELARQIKEEHAHVGTSPRPVLVTLRAAGKPRQYELSEELRLVCQGLVPEIAEKLAAIIHEFDPEDLDEVLQNIYLTGGGAQIHGLDTALADALADYGQVRIKILDDPEYAGALGALRLAEELPPQRWHDSGFT

SEQ ID NO: 21 - protein, 385 aa, delta proteobacteriumMLMS-1
MSETEAEDRPLLLGIDLGVARTAVVSNRGARHLLDSVVGYPRDIIALKTLGAPQIFGARALEHKAALTLYHPLGDGTIAQDRRRDYNAAGELLRHVIELATNSAPPRANVTDHGVHGGPQVAASESAMRTSVPEPARSPLSAVPRDRLRVSGVIAVPATFGAGGRQTLATIAGELLADFLIIEQPLPVAYYLGRLDNSLLIDIGAGSISLCPCRGRLPNPNERVILPKGGDSLDQRLQALISQRYPEVQITRELARQIKEEHAHVGTSPRPVLVTLRAAGKPRQYELSEELRLVCQGLVPEIAEKLAAIIHEFDPEDLDEVLQNIYLTGGGAHIHGLDTALADALADYGQVRIKILDDPEYAGALGALRLAEELPPQRWHDSGFT

SEQ ID NO: 22 - protein, 226 aa, delta proteobacteriumMLMS-1
MNKEVLLGVAREVMDRALVVSEPFMVAYALGRLNRAIIVDIGAGTVDICGVKGSLPAAEDQVTTFKGGDYLDERLEAAIIRRHPGAQVTHSLACRLKEEHAFVGEPEKPVEVTLRVEGKPVQFDITDEMRTICESMVPNIIEQLEVLIASFDPEDQEEVLRHIYLAGGGSRIRGLDAMIARGLREYGEVRVTRVDDPERIGAIGALKLAREIPTNQWAQVGLMFGG

SEQ ID NO: 23 - protein, 330 aa, Bacillus phage 0305phi8-36
MYIFGCDIGFKQFKGINLEDDIEFKFPNIIGFPTSLEIQNATDHGETMKDLWLTYDDETYYVGDKASEFATNHRYTFLANKVDTIDETVKLLTGLGLLYETGQNKIDLMVTGVPVEEYFLVKDKIETEFVRDYDYSFRGRKCRSTIQKVVVVPQGAGDYYDYILDESGQVITERVKPKTVIVNIGYRTTEIVTMNNGRFSRSESTTLYTATNNFHKELRRLLAKEYGIRKNLTQIDEIYRERKVYIKGIATDISELITSAIDMHVGSISGEIPVWVNPDDVHEILLTGGGSTGLTPFFQSQFGDIILKHDNPEFGNARGFAKYGRLIAHG

SEQ ID NO: 24 - protein, 359 aa, Proteus vulgaris
MELLRKGRSFGGLFLIKGKVMNQSERFIVGLDIGYSNVKVACGGTQLLDPKVTIFPAYATPEPESDLALAKKSPDEVKVYPNGTEWRVFTNRVGHRELHESYHSTEMYKALFYGALIKATEGRSDVIDILVTGLPVRIANSEADRSQLCESFTGKHEVTPGRFILVKEVVVLSQGVGIMNDILNTEGLISDEDLEFSNILVIDPGYYSMDYVTFHRGDKKNEFSGSSLNATSVIIEEIVRVLERDYPKEGAQETERIETALRLGNKTFNNGFRSVEIEPLIEEVSHRIVSSVVAELLKRTRSIGPVHIIISAGGGARFYDHFIKEAFPQARILQSVNPVASNSIGYWHYGVNKLSSQSD

SEQ ID NO: 25 - protein, 364 aa, Pseudomonas resinovorans
MQLQRLGFCRCGVSCVAGSSASSFGALLLSFFAGSGIRMGNALGLDIGYSNVIGVFGSGDGQPESIIRPSQAAPLSVLPGDSGLRPGEVIVEVDGAPWVAFAAPGRVQDGRELHEDYTSSHAYEALFKGALLHAAGDKDVIDCLVTGLPVSQARDKPYVEALIKRMTGTHRITPKREVTVKRVEVVAQPIGTLTEIYCNSDASEVIEESVSIIIDPGFFSVDWVVFDHRELVVNSSSSSLKAMSVVLEACNEEIAKDHGGIPGVEKIEHALQSGKSYILIYGRKVELAEYLERAAERVIPSVFTEIKQGLRFLKGRAIDCVILGGGGASLYEPFARKEFPDALVVKPVNSVKSNAEGFWHIARS

SEQ ID NO: 26 - protein, 329 aa, Yersinia ruckeri
YRMSQFVLGLDIGYSNLKMAMGHKGEEARTVVMPVGAGPLELMPQQLTGGAGASIQVVIDGEKWVAGVEPDRLQGWERELHGDYPSTNPYKALFYAALLMSEQKEIDVLVTGLPVSQYMEVERREALKARLEGEHQITPKRSVAVKSVVVVPQPAGAYMDVVSSTKDEDLLEIIQGGKTVVIDPGFFSVDWVALEEGEVRYHSSGTSLKAMSVLLQETDRLIQEDHGGAPGIEKIEKAIRAGKAEIFLYGEKVSIKDYFKKASTKVAQNALIPMRKSMREDGMDADVVLLAGGGAEAYQDAAKELFPKSRIVLPNESVASNARGFWFCG

SEQ ID NO: 27 - protein, 327 aa, Photobacterium damselae subsp. piscicida
MSQFVLGLDIGYSNLKMAMGYKGEEARTVVMPVGAGPLELMPQQLTGGAGTCIQVVIDGEKWVAGVEPDRLQGWERELHGDYPSTNPYKALFYAALLMSEQKEIDVLVTGLPVSQYMDVERREALKSRLEGEHQITPKRSVAVKSVVVVPQPAGAYMDVVSSTKDEDLLEIIQGGKTVVIDPGFFSVDWVALEEGEVRYHSSGTSLKAMSVLLQETDRLIQEDHGGAPGIEKIEKAIRAGKAEIFLYGEKVSIKDYFKKASTKVAQNALIPMRKSMREDGMDADVVLLAGGGAEAYQDAAKELFPKSRIVLPNESVASNARGFWFCG

SEQ ID NO: 28 - protein, 324 aa, Shewanella sp. W3-18-1
MFVLGVDIGYSNLKLAIGQSGSEPKTIILPAGAGPADRMPERIGGGDDETCLYVSVDNERWAAGVPAGRLQGWERELHPEYPTTKTYKALFHAALLMAETESIDLVVTGLPVSQFHEPQRKSDLVQRLKGVHQVTPKRSITVHDVKVLPQPAGAYMDLVQTGGDLGLIEEGRVVVIDPGFFSVDWVALEAGEIRYSSSGTSLQAMSVLLETIDKLISEDHGAKVGMDRLEKAMRTGDLQVLLFGEKVDISPYLNAATKKVAPIALTAMRQSMRDESINADLVLIAGGGALAYKEAAKEIFSRSKIIVPEQSVLANVRGFWFYGA

SEQ ID NO: 29 - protein, 324 aa, Vibrio cholerae
MFVLGVDIGYSNLKLAIGQSGSEPKTIILPAGAGPADRMPERIGGGDDETCLYVSVDNERWAAGVPAGRLQGWERELHPEYPTTKTYKALFHAALLMAETESIDLVVTGLPVSQFHEPQRKSDLVQRLKGVHQVTPKRSITVHDVKVLPQPAGAYMDLVQTGGDLGLIEEGRVVVIDPGFFSVDWVALEAGEIRYSSSGTSLQAMSVLLETIDKLISEDHGAKVGMDRLEKAMRTGDLQVLLFGEKVDISPYLNAAMKKVAPVALTAMRQSMRDESINADLVLIAGGGAMAYKEAAKEIFSRSKIIVPEQSVLANVRGFWFYGA

SEQ ID NO: 30 - protein, 324 aa, Vibrio cholerae B33
MFVLGVDIGYSNLKLAIGQSGSEPKTIILPAGAGPADRMPERIGGGDDETCLYVSVDNERWAAGVPAGRLQGWERELHPEYPTTKTYKALFHAALLMAETESIDLVVTGLPVSQFHEPQRKSDLVQRLKGVHQVTPKRSITVHDVKVLPQPAGAYMDLVQTGGDLGLIEEGRVVVIDPGFFSVDWVALEAGEIRYSSSGTSLQAMSVLLETIDKLISEDHGAKVGMDRLEKAMRTGDLQVLLFGEKVDISPYLNAAMKKVAPVALTAMRQSMRDESINADLVLIAGGGALAYKEAAKEIFSRSKIIVPEQSVLANVRGFWFYGA

SEQ ID NO: 31 - protein, 324 aa, Vibrio cholerae MO10
MFVLGVDIGYSNLKLAIGQSGSEPKTIILPAGAGPADRMPERIGGGDDETCLYVSVDNERWAAGVPAGRLQGWERELHPEYPTTKTYKALFHAALLMAETESIDLVVTGLPVSQFHEPQRKSDLVKRLKGVHQVTPKRSITVHDVKVLPQPAGAYMDLVQTGGDLGLIEEGRVVVIDPGFFSVDWVALEAGEIRYSSSGTSLQAMSVLLETIDKLISEDHGAKVGMDRLEKAMRTGDLQVLLFGEKVDISPYLNAAMKKVAPVALTAMRQSMRDESINADLVLIAGGGAMAYKEAAKEIFSRSKIIVPEQSVLANVRGFWFYGA

SEQ ID NO: 32 - protein, 324 aa, Vibrio cholerae MZO-3
MFVLGVDIGYSNLKLAIGQSGSEPKTIILPAGAGPADRMPERIGGGDDETCLYVSVDNERWAAGVPAGRLQGWERELHPEYPTTKTYKALFHAALLMAETESIDLVVTGLPVSQFHEPQRKSDLVKRLKGVHQVTPKRSITVHDVKVLPQPAGAYMDLVQTGRDLGLIEEGRVVVIDPGFFSVDWVALEAGEIRYSSSGTSLQAMSVLLETIDKLISEDHGAKVGMDRLEKAMRTGDLQVLLFGEKVDISPYLNAAMKKVAPVALTAMRQSMRDESINTDLVLIAGGGALAYKEAAKEIFSRSKIIVPEQSVLANVRGFWFYGA

SEQ ID NO: 33 - protein, 315 aa, Aeromonas salmonicida subsp. salmonicida A449
MKQFILGLDIGYSNLKIAMGFKGGHVTTTVLPVGAGPLALMPQQLTGGEGNCIQIVIDDEKWVAGVEPDRLQGWNRELHDDYPATKPYKALFYAALLLSEQKEIDVLVTGLPVSQFMNPELREALKKRLEGEHQITLKRSVTVKSVVVVPQPAGAYMDIVSSTKDEGLLEVLREGKTVVIDPGFFSVDWVALEEGEVRYHSSGTSLKAMSVLLKTINLLIQEEHGGSPGIDKIEKAIRSGKNEILLFGQKVGLKEYLDRESFNVAQNALIQMRTSMREDGMDADVVLLAGGGAEAYKAAAKARIQLRSATLAYAA

SEQ ID NO: 34 - protein, 341 aa, Bacillus cereus G9241
MKSLYAIDVGIGFTKRAYRQDVDSEVTIKSEASTLAPIPNHAESEDLTKVSFIDLDFAYYMGNEAHQSDASFLPPFDEEIENYYESEQFKQQIFGCIAKDYKENVVLPLVVTGLPVTDFGSQHEQLQRALKKETSVQIDGKFITITVENVLILQQPVALHAYFLKEGIIQEQDRILIIDGGFRTLEMTDMKQNVILNHYETELGCSKPLKNIKNILQNHAGESNQLHINDMPNILEKGYGGREENPQTSQVHTLIQKELDAHFQDVMRVLQEQFKLEQYDTIIWTGGIVDLHKKRIEKIQGEISSFRMVDASKEAALHGYYMIGSQVFDDITNQSVYESKL

SEQ ID NO: 35 - protein, 341 aa, Bacillus cereus AH187
MKSLYAIDVGIGFTKRAYRQDVDSEVTIKSEASTLAPVPNHDESEDLTKVSFIDLDFAYYMGNEAHQSDASLLPPFDEEIENYYESERFKQQIFGCIAKDYKENVVLPLVVTGLPVTCFGSQHEQLQRALKKETSVQIDGKFITITVENALILQQPVALHAYFLKEGIIQERDRILIIDGGFRTLEMTDMKQNVILNHYETELGCSKPLKNIKNIVQNHAGESNQLHINDMPNILEKGYGGREEDPQTSQVHTLIQKELDAHFQDVMRVLQEQFKLDQYDTIIWTGGIVDLHKKRIEKIQGEISSFRMVDASKEAALHGYYMIGSQVFDDITNQSVYESKL

SEQ ID NO: 36 - protein, 340 aa, Bacillus thuringiensis str. Al Hakam
KSLYAIDVGIGFTKRAYRQDEDSEVTVKSEASTLAPVPNHDESEDLTKVSFIDLDFAYYMGNEAHQSDASFLPPFEEEIENYYESEQFKQQIFGCIAKDYKENVVLPLVVTGLPVTYFGSQHEQLQRALKKETSVQIDGKFIHITVENALILQQPVALHAYFLKEGIIQERDRILIIDGGFRTLEMTDMKQNVILNHYETELGCSKPLKNIKNILQNHAGESNQLHINDMPNILEKGYGGREENPQASQVHTLIQKELDTHFQDVMCVLQEQFKLDQYDTIIWTGGIVDLHKKRIEKMQGEISSFRMVDASKEAALHGYYMIGSQVFDDITNQSVYESKL

SEQ ID NO: 37 - protein, 341 aa, Bacillus cereus ATCC 10987
MKSLYAIDVGIGFTKRAYRQDVDSEVTIKSEASTLAPVPNHAESEDLTKVSFIDLDFAYYMGNEAHQSDASFLPPFDEEIENYYESEQFKQQIFGCIAKDYKENVVLPLVVTGLPVTYFGSQHEQLQRALKKETSVQIDGKFINITVENALILQQPVALHAYFLKEGIIQERDRILIIDGGFRTLEMTDMKQNVILNHYETELGCSKPLKNIKNIVQNHAGESDHLHINDMPNILEKGYGDREENPQTSQVHTLIQKELDTHFQDVIRVLQEQFKLDQYDTIIWTGGIVDLHKKRIEKMQDEISSFRIVDASKEAALHGYYMIGSQVFDDITNQSAYESKL

SEQ ID NO: 38 - protein, 341 aa, Bacillus cereus E33L
MKSLYAIDVGIGFTKRAYRQDEDSEVTVKSEASTLAPVPNHDESEDLTKVSFIDLDFAYYMGNEAHQSDASFLPPFEEEIENYYESEQFKQQIFGCIAKDYKENVVLPLVVTGLPVTYFGSQHEQLQRALKKETSVQIDGKFIHITVENALILQQPVALHAYFLKEGIIQERDRILIIDGGFRTLEMTDMKQNVILNHYETELGCSKPLKNIKNIVQNHAGESSHLHINDMPNILEKGYGGREEDPQTSQVDTLIQKELDAHFQDVMRVLQEQFKLDQYDTIIWTGGIVDLHKKRIEKMQGEISSFRMVDASKEAALHGYYMIGSQVFDDITNQSVYESKL

SEQ ID NO: 39 - protein, 341 aa, B.thuringiensis serovar konkukian str. 97-27
MKSLYAIDVGIGFTKRAYRQDEDSEVTVKSEASTLAPVPNHDESEDLTKVSFIDLDFAYYMGNEAHQSDASFLPPFEEEIENYYESEQFKQQIFGCIAKDYKENVVLPLVVTGLPVTYFGSQHEQLQRALKKETSVQIDGKFIHITVENALILQQPVALHAYFLKEGIIQERDRILIIDGGFRTVEMTDMKQNVILNHYETELGCSKPLKNIKNILQNHAGESNQLHINDMPNILEKGYGGREENPQASQVDTLIQKELDTHFQDVMCVLQEQFKLDQYDTIIWTGGIVDLHKKRIEKMQGEISSFRMVDASKEAALHGYYMIGSQVFDDITNQSVYESKL

SEQ ID NO: 40 - protein, 341 aa, Bacillus cereus NVH0597-99
MKSLYAIDVGIGFTKRAYRQDEDSEVTVKSEASTLAPVPNHDESEDLTKVSFIDLDFAYYMGNEAHQSDASFLPPFEEEIENYYESEQFKQQIFGCIAKDYKENVVLPLVVTGLPVTYFGSQHEQLQRALKKETSVQIDGKFIHITVENALILQQPVALHAYFLKEGIIQERDRILIIDGGFRTLEMTDMKQNVILNHYETELGCSKPLKNIKNILQNHAGESNQLHINDMPNILEKGYGGREENPQASQVDTLIQKELDTHFQDVMCVLQEQFMLDQYDTIIWTGGIVDLHKKRIEKMQGEISSFRMVDASKEAALHGYYMIGSQVFDDITNQSVYESKL

SEQ ID NO: 41 - protein, 341 aa, Bacillus anthracis str. Ames
MKSLYAIDVGIGFTKRVYRQDEDSEVTVKSEASTLAPVPNHDESEDLTKVSFIDLDFAYYMGNEAHQSDASFLPPFEEEIENYYESEQFKQQIFGCIAKDYKENVVLPLVVTGLPVTYFGSQHEQLQRALKKETSVQIDGKFIHITVENALILQQPVALHAYFLKEGIIQERDRILIIDGGFRTLEMTDMKQNVILNHYETELGCSKPLKNIKNIVQNHAGESDHLHINDMPNILEKGYGGREEDPQTNQVHILIQKELDAHFQDVMRVLQEQFKLDQYDTIIWTGGIVDLHKKRIEKMQGEISSFRMVDASKEAALHGYYMIGSQVFDDITNQSVYESKL

SEQ ID NO: 42 - protein, 341 aa, Bacillus cereus AH1134
MKSLYAIDVGIGFTKRAYRQDVDSEVTIKSEAATLAPVPNHAESEDLTKVSFIDLDFAYYMGNEAHQSDASFLPPFEEEIENYYESERFKQQIFGCIAKDYKENVVLPLVVTGLPVTCFGSQHEQLQRALKKETSVQIDGKFIHITVENALILQQPIALHAYFLKEGIIQERDRILIIDGGFRTLEMTDMKQNVILNHYETELGCSKPLKNIKNIVQNHEGESNQLHINDMPNILEKGYECREENHETSQVHTLIQKELDAHFQDVMRVLQEQFKLEQYNTIIWTGGIVDLHKKRIEKMQSEISSFRMVDASKEAALHGYYIIGSQVFDDITNQSAYESKL

SEQ ID NO: 43 - protein, 341 aa, Bacillus cereus ATCC 14579
MKSLYAIDVGIGFTKRAYRQDVDSEMTIKSEASTLAPVPNHAESEDLTKVSFIDLDFAYYMGNEAHQSDASFLPPFDEEIENYYESERFKQQIFGCIAKDYKENVVLPLVVTGLPVTCFGSQHEQLQRALKKETSVQIDGKFIHITVENALILQQPVALHAYFLKEGIIQERDRILIIDGGFRTVEMTDMKQNVILNHYEAELGCSKPLKNIKNIVQNHEGESNQLHINDMPNILEKGYECREENHETSQVHTLIQKELDAHFQDVMRVLQEQFKLEQYNTIIWTGGIVDLHKKRIEKMQSEISSFRMVDASKEAALHGYYIIGSQVFEDITNQSAYESKL

SEQ ID NO: 44 - protein, 341 aa, [Bacillus weihenstephanensis KBAB4
MKSLYAIDAGIGFTKRAYRQDVDSEMTIKSEASTLAPVPNHAESEDLTKVSFIDLDFAYYMGNEAHQSDASFLPPFDEEIENYYESERFKQQIFGCIAKDYKENVVLPLVVTGLPVTCFGSQHEQLQNVLKKETSVQIDGKFINITVENALILQQPVALHAYFLKEGIIQERDRILIIDGGFRTLEMTDMKQNVILNHYETELGCSKPLKNIKNILQNHAGESNHLHINDIPKILEKGYGGREKNYQTSQVNTLIQKELDAHFQDVMRVLQEQFKLDQYDTIIWTGGIVDIHKKRIEKMQGEISSFRMVDASKEAALHGYYIIGSQVFEDITNQSAYESKL

SEQ ID NO: 45 - protein, 341 aa, Bacillus cereus B4264
MKSLYAIDVGIGFTKRAYRQDVDSEMTVKSEASTLAPVPNHAESEDLTKVSFIDLDFAYYMGNEAHQSDASFLPPFDEEIENYYESERFKQQIFGCIAKDYKENVVLPLVVTGLPISCFGSQHEQLQRALKKETSVQIDGKFIHIMVENALILQQPVALHAYFLKEGIIQERDRILIIDGGFRTLEMTDMKQNLILNHYETELGCSKPLKNIKNIVQNHEGESNQLHINDMPNILEKGYECREENHETSQVHTLIQKELDAHFQDVMRVLQEQFKLEQYNTIIWTGGIVDLHKKRIEKMQSEISSFRMVDASKEAALHGYYIIGSQVFDDITNQSAYESKL

SEQ ID NO: 46 - protein, 341 aa, Bacillus cereusW
MKSLYAIDVGIGFTKRAYRQDEDSEVTVKSEASTLAPVPNHDESEDLTKVSFIDLDFAYYMGNEAHQSDASFLPPFEEEIENYYESEQFKQQIFGCIAKDYKENVVLPLVVTGLPVTYFGSQHEQLQRALKKETSVQIDGKFIHITVENALILQQPVALHAYFLKEGIIQERDRILIIDGGFRILEMTDMKQNVILNHYETELGCNKPLKNIKNIVQNHAGESNQLHINDMPNILEKGYGGREENPQASQIDTLIQKELDTHFQDVMCVLQEQFMLDQYDTIIWTGGIVDLHKKRIKKMQGEISSFRMVDASKEAALHGYYMIGSQVFDDITNQSVYESKL

SEQ ID NO: 47 - protein, 341 aa, Bacillus cereus AH820
MKSLYAIDVGIGFTKRAYRQDEDSEVTVKSEASTLAPVPNHDESEDLTKVSFIDLDFAYYMGNEADQSDASFLPPFEEEIENYYESEQFKQQIFGCIAKDYKENVVLPLVVTGLPVTYFGSQHEQLQRALKKETSVQIDGKFIHITVENALILQQPVALHAYFLKEGIIQERDRILIIDGGFRTLEMTNMKQNVILNHYETELGCNKPLKNIKNIVQNHAGESNQLHINDMPNILEKGYGGREENPQASQIDTLIQKELDTHFQDVMCVLQEQFMLDQYDTIIWTGGIVDLHKKRIKKMQGEISSFRMVDASKEAALHGYYMIGSQVFDDITNQSVYESKL

SEQ ID NO: 48 - protein, 341 aa, Bacillus cereus G9842
MKSLYAIDVGIGFTKRAYRQDVDSEMTIKSEASTLAPVPNHTDSEDLTKVSFIDLDFAYYMGNEAHQSDASLLPPFNEEIENYYESERFKQQIFGCIAKDYKENVVLPLVVTGLPVTCFGSQHEQLQHALKKETSVQIDGKFINITVENALILQQPVALHAYFLKEGIIQEQDRILIIDGGFRTLEMADMKQNLILNHYETELGCSKPLKNIKNILQNHAGESNQLHINDMPKILEKGYGDRDENYETSQVDILIQKELDAHFQDVMRVLQEQFKLDQYDTIIWTGGIVDIHKKRIEKMQGEIASFRMVDASKEAALHGYYIIGSQVFEDITNQSAYESKL

SEQ ID NO: 49 - protein, 341 aa, Bacillus thuringiensis serovar israelensis ATCC356
MKSLYAIDVGIGFTKRAYRQDVDSEMTIKSEASTLAPVPNHTDSEDLTKVSFIDLDFAYYMGNEAHQSDASLLPPFNEEIENYYESERFKQQIFGCIAKDYKENVVLPLVVTGLPVTCFGSQHEQLQHALKKETSVQIDGKFINITVENALILQQPVALHAYFLKEGIIQEQDRILIIDGGFRTLEMADMKQNLILNHYETELGCSKPLKNIKNILQNHAGESNQLHINDMPKILEKGYGDRDENYETSQVDILIQKELDAHFQDVMRVLQEQFKLDQYDTIIWTGGIVDIHKKRIEKMQGEIASFRMVDASKEAALHGYYIIGSQVFEDITNQSAQKSQL

SEQ ID NO: 50 - protein, 275 aa, Bacillus anthracis str. A2012
MKSLYAIDVGIGFTKRVYRQDEDSEVTVKSEASTLAPVPNHDESEDLTKVSFIDLDFAYYMGNEAHQSDASFLPPFEEEIENYYESEQFKQQIFGCIAKDYKENVVLPLVVTGLPVTYFGSQHEQLQRALKKETSVQIDGKFIHITVENALILQQPVALHAYFLKEGIIQERDRILIIDGGFRTLEMTDMKQNVILNHYETELGCSKPLKNIKNIVQNHAGESDHLHINDMPNILEKGYGGREEDPQTNQVHILIQKERMHTSKTLCVYYKNNLS

SEQ ID NO: 51 - protein, 343 aa, Bacillus cereus 03BB108
MLLGNPYAIDLGNGFTKRASKKNKSLEADVITELSVLAPVDDYYNEASFTKIELTNTDFPYYIGEEARKSKLPLIRALGENKAKRYEDPTFKKQLFGFIAKDFKKNVTIPLLVTGLPVSHFGNQRESIQKVAMEETAVKVNGELITIKVKQCLVIPQPVGTQYYLVKKEIINKEDRILIIDGGFGTFDVTDMSGNAVIDRLGTELGCEKAFMSIEQIVRDNIGETPDLSVSNMHYILENGYKYNGSLYDLYTHKDVAEQVDAELQRHFDAALREVSQKFNLAVYDKIVWTGGMAALHKKRIEKKKEQFPTFAVLENGQEANLLGYYYLGCDVFDKLTKEKASN

SEQ ID NO: 52 - protein, 298 aa, Bacillus cereus subsp. cytotoxis NVH 391-98
MSGGKMKLKTYKVEGTEYVWGDDIIKVNNTLNTYAQQNRYKTNQYKTLSKIALAEMAAKTNVKSYDEILVITGVPSEEIGTKAVDEIKEVYQGAHDLEVNGKKVSINVVDVIVLAQPVGTVMSRYLDEDGFVADDTYEDMTVGIIDIGTGTTDLDVISMLRREKESTSVPKGMHDVYEPIVAKIKKETSATINDYKLEKVFEEGAYQASKRMDPIDFNDEKTASIKEVYDFIVNGVNNAWKTFDRFDEVLVSDGGANTFHELLEEWIGKVTKLEESQTANVEGFYRYGKFEVGEEDGE

SEQ ID NO: 53 - protein, 346 aa, Staphylococcus aureus
MSNVYVMALDFGNGFVKGKINDEKFVIPSRIGRKTNENNQLKGFVDNKLDVSEFIINGNNDEVLLFGNDLDKTTNTGKDTASTNDRYDIKSFKDLVECSIGLLAREVPEEVVNVVIATGMPSNEIGTDKQAKFEKLLNKSRLIEIDGIAKTINVKGVKIVAQPMGTLLDLNMENGKVFKAFTEGKYSVLDFGSGTTIIDTYQNMKRVEEESFVINKGTIDFYKRIASHVSKKSEGASITPRMIEKGLEYKQCKLNQKTVIDFKDEFYKEQDSLIEEVMSNFEITVGNINSIDRIIVTGGGANIHFDSLSHYYSDVFEKADDSQFSNVRGYEKLGELLKNKVEQESK

SEQ ID NO: 54 - protein, 376 aa, Natranaerobius thermophilus JW/NM-WN-LF
MVWGSIPDKDRKRRRFSDGISEEDEVISEEEEHHLGGDDAFDRSVKNVGIDLGYGYVKFIDGKEPKMFPSVVGYGNSQKYKSALQLDLNPLDDLQIKIGDEHFFIGDLAIRQSEVASRSLGKDRSQDKNARVLMLTALSLLSSWDKQGFNLVTGLPTNFYAAFAEEWESTLNGEFKTKMKIGGKTQERSFQIEEVTTLPQPFGTLYDQVLNSVGKVVDRDLTDSKIGIVDIGFKTTDLAVSDGMEFINPLSFSTTTGLSNVNRLVNEKLRHEFKIDREEHQLDDCINSQKIMVAGKSEDISSWVREALQTVSDKISVEIESKWDYRDFDTLLLTGGGGEMLYPYLKDKFPNLVLVEDPQTANVRGYQKLANNLFNA

SEQ ID NO: 55 - protein, 351 aa, STH3287Symbiobacterium thermophilum IAM 14863
MERLIGVDLGYGFVKATDGREGYLFPSVVGDGSPYLPLRLASQETDPTDNLRVQIGDRVYHVGTLAVRQSRMAYGFLSVMRDEGNDLLVLFLTALSLFASEANTTFSVVTGLPPGRMHLADQFVRSVRGDHRVVRYRTGNPEELYLRVDRVTVVPQPLGTYWSQVLDARGQLAQQHPAADARVGIVDIGFRTTDLVTVEGGEYVPEQSRTVPTGLSAAYGAVANALLREYGIERENHALDEAIISGEIGVSGRRVDITGLREKAFEQLATKVLVEIRSTWQVADYDFLWFTGGGGLALQRYLVPQFSQASLIADPLTANSREYLAWAHYIYGTGGAPWLERTPVNPQPRQG

SEQ ID NO: 56 - protein, 384 aa, Halorhodospira halophila SL1
MERCIGLDMGYGFIKIDDGREGHVFPSVVGEGESGMPMSLGVAQRSGSSELRITYGGKSYLLGDYAIRHSRLAHRGLSPTRAEGDDLKILFLGALSLYARETVNNFHVVTGLPPGRMHMADDLVRQLRGDHEVIRHVGASRFGVSIRLEQIEVVPQPVGSFWAEVLDDRGQIRGDHPLLNGRVGIMDIGFRTSDFATVIDGEYSPGFCKTVPLGISFGYEEIAQELSTQYGLEREQYTLDEAIIQGQVNVNGRPVDIVELRDRIFGDIATKLLVEARSMWQIQEYDHIIITGGGGRVLERYLRPELSQAQLAQDSVTANARGYFNWAYFNAQQRAAEMGHATEQSSAEDYSSGSYGTGSTTYSRGGDDGRDSAAVPQSRSGSEG

SEQ ID NO: 57 - protein, 348 aa, Desulfatibacillum alkenivorans AK-01
MDVLGIDIGFGFTKATNGKEFLMFKSLLGEAAEIPFRANLANSSFTENLHVTVDEQTFFVGDFAERQSGVRQSTLDQDLLVQEFAKVLALTAAGIFSEKYAPMNVVSGLPVGYFTEYKEAFVKAILGHHTVNYHKADGSVVTRRININRVRMIPQPMGSVLNLLMDERGRITDRDLANKKVGVVDVGFKTTDFIIFDKLQFITRGSRTIDTGISDIFRTIANKLRKQVDVSLELYRLYDPVSKGSIRIRGQELELAEIRDHVYAQAAGEIADEINQIWADDWDMDTVVLTGGGGMELAKHLQPLIAGNVVGIPNDVDARLNNVQGYLKFARHLWEKDEPPPAREESAE

SEQ ID NO: 58 - protein, 345 aa, Thermoanaerobacter pseudethanolicus ATCC 33223
MFKIGLDLGYGYTKGINETGRMVLFPSLVGNAYQRNLIGLFGQNLNNLIENMHVVLRNGKEEQEEYFIGDLARREGRNVSYAFDENKINHPNTKAVLASASALLFPSNDEPVHIVSGLPLEQYIHQKDELRDMLKNFKAIVEFKGYNILKIVKFDRVTVFPQAAGAVYYAIMDDLQKYLIKGSYIGLIDIGYRTTDYIVFVVDGKLSLREDLSGTLDIGMSQLNNAADKLFTQKTGSKLDIPELIQLVNEGSIFYRGKVLNFEKELNEVKLEISRVIQDRIKAVWGSKLDFFNTIFLAGGGAVSLFDSLKNLYENTVLVKNSQFANAKGFLKVAELEEKKERDRE

SEQ ID NO: 59 - protein, 350 aa, Clostridium botulinum A3 str. Loch Maree
MNKYTIAIDLGYGQIKGINQDNKRVIFPSIISSGKDRSLDTFFNSIDNIVDNIHVKILDEYFNEKEYFVGELAKRQPSNSSFINRDNKINSEENKVLLATALGLLIPNDLPNDTKIHIVTGLPLEHFIKQKQALNDMLKDFEHTIKFVDHNFSRNIKFEESNITLFPQGAGAIFSKINNDISSLLIKETFIGLIDVGFKTTDIVVFRINKDKEPVFEQEMSATLDGLGMINIYNTMDKAFTDNSRDGSKLNTEQLMLLCEEGKIFFKGDYIDLKKDLIKARKTLSTNIINKADGLWGSRKNSFNSIMIAGGGGKVLYNHLKLIEPNMCQLIDNPEFANAIGYLEFGKQFK

SEQ ID NO: 60 - protein, 342 aa, Thermoanaerobacter pseudethanolicus ATCC 33223
MFKVGLDLGYGYVKGINEKGKEVLFPSLVGNAYERVLSGLFGTDNNKADNMHVVIVNENKEEYFVGELARREGKNVSYAFDEDKIYHPNTRALLTASCLLLLPEEEVPVHIVTGLPLEQYIHKKEEFKNMLKNFKVMAYFKGDEKVKTIKFEKVTIFPQAAGAVYHAVMADIQKYLVKGSYIGLIDIGFKTTDYIVFMVEDKLILREDMSGTVEVGMSALNNTVDKIFTQRTGSKIDVSELIRLISDGKIFYKGRELDFTKEIDAVRSEIARVMKDKIKLIWGSKLDFFNTVFLAGGGAKELVEYMKDFYEKIVLVKNAQFANARGFLKVAELEEKKAVNVR

SEQ ID NO: 61 - protein, 334 aa, Thermoanaerobacter tengcongensis MB4
MNIGLDLGFGYVKGVNSQNKRIIFPSIVSIGFDRPLAGIFNTNDIIENLHVKIVDKDGENSYYVGNLARREGFSNSFALDIDKYTEPEAKALLSTAIFLLTMNENEPINLVTGLPLKQFQAYKKAFEEELKNYKALVSLPEYRLMKTVEFEKVTVFPQAAGAVYYALLEDLDKYLLSDSYIVLIDIGFKTTDYIVFFVEDRPYFLADLSGTIDAGISKIFTAMEQIYTAKTGSNLDTGDFITILNKGSIYFKGKYIDFTEEITALKKELAKLIEKRIYTSLKGILDKVMVIFVAGGGGADLYPYLKDVHTSVELVKDAQFANALGFLKVAEIQK

SEQ ID NO: 62 - protein, 265 aa, Paenibacillus sp. JDR-2
MSILTIDGGGSTIKVYDGDQVRQFPSTISYDWRPRNIESKGQFDFEWEYNGEKGFAGTLAQRESDCADSLKGDTKAHPEAALRVLLALHQYCPDPAPKIIVGQPIKTHTPDEKNAIKGMLLNRRHDITVNGQRRIILIQRCEVAAEGVSAGLLIPVGGTIRVIDIGSGTVNFGTLIDRQFNDLGSFTLSTGVETTRGGVAALAHQIARAARAAKWQPEEKVNLCGGGALVMLELLRPYFPNVGVIPDPVTANVRAFHMIARKVYG

SEQ ID NO: 63 - protein, 266 aa, Natranaerobius thermophilus
MIVAVDAGNYETKVVNSHGKYSFYSDIGEYRERKLNQKHGSDDMEWEYQGERGFAGSLAKFESEYGGSMMGDSKYHRDGLLRVLLALHQYCDDNNFKIVVGQPISSHTQAEKQRIKEMLEGDHILTVNGVKKTIRILNCQVAAEGASAFWIHPQGGCVRMLDIGSGTINAATILDRRYVDKDSFTINFGANSNLTNDVKEMANAIIRKSHKWNKDDRVWLIGGIAEEIEPYLTGHFKNLKVLKPNGLHSKWANVLGYYALASGLYE

SEQ ID NO: 64 - protein, 364 aa, Trichodesmium erythraeum IMS101
MVIKQPAAAAMLTQKPSNINKKAILSADLGRTATKACVSRTQNGVVFIPSNVKQLSVDQVRAGNFESKPTDPLLDMWLEYQGYGYAVGQLAADFGANLFGDERSFAKSKIEDALVKVLACAGYFQLKGEFSVVIGLPFYNQEQFEKEKAQIISQLESPHQMFYRGGEEVEIRINKVWVMPEGYGSLLWTEANHGKEFQPQLPKLSLAIVDIGHQTTDFLMVDRFRFARAASKSEPFAMSQFYEDVASKIEGADSQSLYLLEAVHKPEGQRSYRPKGATKPINLDGIIPELRKVFAAKLCDRLIKWIPERVSDVILTGGGADFFREDLEKLLQEAGLKSHLAQPPREANALGQYIYGEAQLAISK

SEQ ID NO: 65 - protein, 389 aa, Nostoc punctiforme PCC 73102
MTDQPSAANPMNSAAIPMNRQPLASTTPINAVNNNPPTTTKSGGGSGKTILSVDLGRTSTKTCVSREPGSVVFVPANVKQMSIEQVRGGVFEARATDPLMDLWLEYQGNGYAVGQLAADFGANLGVGQSKVEAALVKVLASAGYFKLRDDISVVLGLPFLSLEQFEKEKAQLISQVGGPHVLNFRGESISLNVSKVWVMPEGYGSLLWSEAQPKKSPSSPDFTKISVAIVDIGHQTVDLLMVDNFRFARGASKSEDFGMNKFYELVSAEIEGADSQSLALISAVNKPRGERYYRPKGASKPTNLDDFLPNLTEMFSREICSRVLAWLPERVTDVILTGGGGEFFWDDVQRLLKEAKINAHLAAPSRQANALGQYIYGEAQLSSNRAARA

SEQ ID NO: 66 - protein, 371 aa, Lyngbya sp. PCC 8106
MQSNKQPVGQPAVGPNTIMNRQTTTTTTSSRRTILSVDLGRTSTKACVSRNPNEVVFIPSNVAQLTVEKARGGGFESENTDPLLDLWLEYRGDGFAIGQLAADFGANLFGGNDTDSPSKVNDALIKIFACAGYFKMKGDVEVILGLPFYSQEQFEREKEQIISLLMGPHVLLFRADQITIDIKSVRVMPEGYGSLIWCEAQKSKETPNFADLSVAIVDVGHQTTDFLTVDRFRFARGVSQSEVFAMSKFYEEVATKIEGADSQSLYLLEAVHRPAGQRFYRPRGSAKPVNLDEIVPELRKKFAQELSSRLVEWLPERVTDVVLTGGGGEFFWEDLQPLLKQAQLRAHLAQPARKANALGQFVYGEAQQVKR

SEQ ID NO: 67 - protein, 318 aa, Nostoc sp. PCC 7120
MFVPANVKQMSIEQVRGGVFEARATDPLMDLWLEYQGKGYAVGQLAADFGANLGVGQSKVEDALIKVLASAGYFKLKDEISVVLGLPFLSLEQFEREKAQLTSQVTGPHVLNFRGESVSLNITKVWVMPEGYGSLLWSEAQPKKGGASPDFTKISTAIVDIGHQTIDLLMVDNFRFARGASKSEDFGMNKFYELVAAEIDGADSQSLALISAVNKPKGERFYRPKGASKPTNLDDSLPNLIEQFSREICSRVLAWLPERVTDVIITGGGGEFFWEDVQRLLKDAQISAHLAAPSRQANALGQYIYGEAQLSSNRAARA

SEQ ID NO: 68 - protein, 383 aa, Anabaena variabilis ATCC 29413
MTDQPSAATPMNAAAIPLNRVSASTPINAAPANNKPNNGSSKSILSVDLGRTSTKTCVSREPNNVVFVPANVKQMSIEQVRGGVFEARATDPLMDLWLEYQGKGYAVGQLAADFGANLGVGQSKVEDALIKVLASAGYFKLKDEISVVLGLPFLSLEQFEREKAQLTSQVTGPHVLNFRGESVSLNITKVWVMPEGYGSLLWSEAQPKKGGASPDFTKISTAIVDIGHQTIDLLMVDNFRFARGASKSEDFGMNKFYELVAAEIDGADSQSLALISAVNKPKGERFYRPKGASKPTNLDDSLPNLIEQFSREICSRVLAWLPERVTDVIITGGGGEFFWEDVQRLLKDAQISAHLAAPSRQANALGQYIYGEAQLSSNRAARA

SEQ ID NO: 69 - protein, 381 aa, Nodularia spumigena CCY9414
MTDQPSAATPMNAAAIPLNRAANIPINANPATNRPNLGGKTILSVDLGRTSTKTCISREPANVVFVPANVKKMSIEQVKGGVFEARATDPLMDLWLEYQGYGYAVGQLAADFGANLGVGQSKVEDALIKVLSCACYFKLKDEISVIMGLPFLSLEQFEKEKAQLTSQVTGPHVFNFRGESVSLNITKIWVMPEGYGSLLWSEAQPKTGGKVPDFTKISVAVVDIGHQTIDLLMVDNFRFARGASQSEDFGMNKFYDMVAAEIDGADSQSLALITAVNKPKGERLYRPKGASKPTNLDDFLPNLIEMFSRDICSRVLAWLPERVTDVIITGGGGEFFWEDVQRLLKEAQINAHLSAPSRQANALGQYIYGEAQLSVGRATRA

SEQ ID NO: 70 - protein, 509 aa, Anabaena variabilis ATCC 29413]
MIPLVFGALGMAVGAVAGAFTAHAAGEKNRQEAKHHKQIANELTNKYASLAEQYYELADKNKKDVKKLTDQLALSEVEKDFLRLAVRLQQNLIFLMWEIDREPTVNALNSFQSAVEQTNQVLSQLQEELIIVPDDYYTRTLTAIEVTKEINLIIPSDTDSTNILSVDLGRAFTKACISREPSSVVFIPANVKHIPFEQIFTGAIYKYSSIPTDPLMNLWLEYKGSGYAVGQLGAKLGANLGVGQSKVEDALAKILAAIGYFKLKDEISVVISLPFLCSEQFEIEKTELISIIAGPHIMKFRGESVYFNITKVWVMPEGYGSLLWKEAQPKKRGDVPDFTKNSVAIIDIGYESTNIIMLNNFCFVKDASKSEYFGMNKLYELIASEIEGADSQSLALISAITKPKEERFYRPKGASKAINLDDFLPNLIECFSREICSRILAWLDEQEDWTMNRVTNLIITGGGGEIFWEDVQRLLKEARINAHLAAPSRQANALGQYIYGEARLRKFNS

SEQ ID NO: 71 - protein, 1 aa, Artificial Sequence
  synthetic protein
M

SEQ ID NO: 72 - protein, 329 aa, Clostridium tetani E88
MENITNEYVMTLDAGKYETKLIGKNKKGTTEDIKRVIFKTKIYNLEDGYIDIEGNSHKIELDGKEYLIGEQGVEDSSETSKTNLIHKLAAYTAITQVLDSNKNNKVQLVLACPLSVLRNAKAKEEYRDYIKGNGEITVKVDDKEYSFEITDITIKAEGSGVLFLEQENFKNKNVAVIDFGGLNMGFSLYRNCVVNPSERFIEEHGVKDLIIRVGDALTDLNNGNLITNEQAESALNNGYMKKGGEIDTESSTVIKKVKEKFLKDAIKLIEKRGFKLDQLDSLIFIGGTTQKLKEQISKTYPNNSIITNNSQWTTCEGLYKVAVAKYCIQ

SEQ ID NO: 73 - protein, 389 aa, Clostridium difficile QCD-76w55
MNEKIANKIIVVDPGKNAVKVVVFSNTYELLTHYMFPSKTQIKRTFSDIDGSSDFQFRAEFEGSKYLIGEGVQSSYNFETTKNNIHHQLCVYTAIAKEVHSKNENVHVVVGYPSSDFSNEIQREKYVDLIKSNEKIDIILNGSDKSFNISEFNVFPEGMALVPRMKFPKRKVRVIDIGGQNLNHRLYDEKGNTLESFSLDEAGINHLEEYLRTTLRKNINADMVDIDSINILEAIEKQKIDAISDDMINGYDSVASFIENTVLDFIDNKILNQLSSKNVFLYKRSHLIIFTGGGSITLKKYLEELLPNNIGNLYFSETATWDNCASYLIKDLTLKFKDSKISKIELANYTKKIVKAFNDLIIGITPSTEENLTEDEELINRKRKTVKQK

SEQ ID NO: 74 - protein, 324 aa, Natranaerobius thermophilus JW/NM-WN-LF
MSNNILNCEIDLGYWFSNLRTRKILGEKNIRLRSKVEFTTDALISGAGTYHFRHDDLKGVVGEGASQHSLELDKTRDKAYKVLAYSLIALAIEKNKDQMERDKEFPIINLVTNYPLNIYNGQTKEQFEEFLKTSDFIHVFVNREHKLFWLKNCTVFPQTVPVSYANPSAFKNQIKGIVDIGGMTTQGVILDSFNIIPSSRFTENLGCLNLYNKVRKALNSYFTVNIQDYEMPTIIKNGLRVNTKKSLEIIDEIIRDHIKEIQNAMTVNNWNEENIPIMFTGGGSLLLREYLEEMFPHVEFSQDPLWDNAKGLRKVGEIFYGRQN

SEQ ID NO: 75 - protein, 343 aa, Acidovorax sp. JS42
MELIVRAVDVGSGNTKFVTGVTGTEIRCASFPSIAYPSSGETPQWPASERRKTVCIPVGPLFYEVGPDVGLAADTFRAKQLHDEYTESPEYMALLRGALSMMKVPHIDLLIVGLPVALFILKKAALEKAVVGSHQVGGGKTVTVAKAMAVAQPQGALVHYAAEHQKIETIGTEQSLVIDPGSRTFDWLVTRGMRLVQKQSHSINRGMSDVLRLLAAEISKDIGTPYRDFDAIDLALRTGKAPVIFQKPYDMKKHLPLAESVAQQAVSTMRQWIETPESLQNIILVGGGAFLFKKAVKAAFPKHRIHEVKEPMFANVRGFQIAGHNYAASAMASGRDRGAGEAV

SEQ ID NO: 76 - protein, 394 aa, Polaromonas sp. JS666
MKPETPMVDVRAVDVGYFSTKLTLARNLEGNASTIASMKPETPVVVDVRAVDIGYFSTKLTLGRKLVGNASTIATALFPSLAPRLPASMSMQTALHGKPDGSVVDVDDVNYFVGRDAILYSSGREPREVLADYSMTDKYHALMRGAFHYIAQDAKATSELVIRHLVMGLPLNTFGENRDRLAARATGEHLLPDPSNPGSMRRITVEKASVIVQPQGALVSYGTTHREIFKEGWVLVVDPGGGTLDWYVARGRLPNWQRSGAYPKSMLACAYAVADRIDPTWRDNFEIIERIDKAIRDKAPSFMTAGNTYELAPYTSAIEAVLKESTDKMVARLGSLDNLDLILFTGGGAKVYFDFFKSRNPKLTNIMFMDDDPVFSNVKGFHVAGEIMSKSRTI

SEQ ID NO: 77 - protein, 350 aa, Ralstonia pickettii 12D
MSKSTPAIVRAIDVGYGNTKYTLSQRNIDMDAEVGLFPSLAPRATQSDFTGGLMAKADRIVVQVDGESYSVGMDALAESKGIYKREVASAYSTSRAYRALFLGALQKMRLTAIDYMVVGLPLTTYDRYAKELTELLTGTHEVPNPMALDQALKVTVRRVKVFPQPSGAFYNYAVPRKLLQSMSQQTNLVLDPGYGTLDWFVTEGAKPLTGRCSATPKSVWAVISAVADHIGPDLTSNPRTMSRIDNALRTGAPLTINGKTIDISPFKPIVDQIVADAINDMLMSIGNLSDIDNILITGGGAHLFVDHVKKELGKTHSQIHVDTDPVYSNVRGFQYAGEFWAGMDRQRAAA

SEQ ID NO: 78 - protein, 369 aa, Rhodoferax ferrireducens T118
MGLFPERLYQTARIEQVQHTTVFMSKTPPTFRALDLGFGFTKFSKGHYLQDGSLEVSAFPSYAAAAVNFSIGAGVMTDLSIVKVSVDDEHFLVGEDVRNAADGVGRQMLESTFFTSSQYIALARGAMGFMNVPNHGEVDSLVMGLPLNIFRDQSIVDHVEAAMKGTHLVPDITKNSGVERTILVKNVSIIPQVVGSLVAMSRDAGLMQKVNEQHNLTIDVGYGTLLWLVSDGFTPVPARSNGNMGGVSSLLQKIIRSIDPSAVSSINIMDRLDKALLEDKASILINGAEVEVAKYHRQLASAARENLTEMIRSIGTKADIDNVFLTGGGAHLYKDAIAAVFPGRQVHIASKGSRFTNVRGFQFLAETED

SEQ ID NO: 79 - protein, 341 aa, Ralstonia metallidurans CH34
MKQQNELIKHPTIAIDVGYGNTKTAWAMGAEIATNMFPSLAPLAANSSLNAFGGGVFKGRNVLNVEVDGARYEVGPGVSISGAHVHTGRSLSEDFATTAGYAALLAGALHYAGAREVDRLVLGLPVHNTQKYAAHLKERFAGTHNFGWGDIHVGSVLPLPQPLGTLIHYIQQRGKQYDPDNSYLVIDVGYFTTDWVVARGYTVDDTRSGGVPGGAARIYQQVASLITADRNQPDVGIERIDQAIRDAKPLVYFGEDLDMGPYLSEAMALTNQPVKEIQTRVGRTDDLRAIILTGGGAQLYAPAIRAAFPLNPIHMMDSPCFANVRGFYTIGAATRQASRAA

SEQ ID NO: 80 - protein, 347 aa, Dechloromonas aromatica RCB
MELIVRAVDVGSGNTKFVTAAAGTDIRCASFPSVAYPSSDDSPSWPASERKKTVCIPIGPLFYEVGPDVSLAADTFRAKQLHDEYTETPEYMALLRGALSMMKVSHIDLLVVGLPVALFTVKKSALEKAMTGRHDIGNNKVVTVGKAMAVPQPQGALVHYASEHQKMVEIGNEQSLIIDPGSRTFDWLVARGMRFVQKQSYSFNRGMSDVLRLLAAEITKDIGSPYRDYDAIDLALRTGKQPLIFQKPYDMKRLLPLAETVAEQAVSTMKEWIEAPHSLQNIILVGGGAFLFRKAVKAAFPKHRIHEVKEPMFANVRGFQLAGQNYARSKMTATDRGQVQGASGELE

SEQ ID NO: 81 - protein, 334 aa, Burkholderia ambifaria MC40-6
MKTAVFAVDVGYGNTKYAHRAASGTIATGMFPSLTPLAASRTLSGYGESVLTARKVSTIVIDQVEYEVGPDVPLTAAYGNTGRALADDYVLSDNYAALLFGAIHFSGVTHIERLVLGLPVHNMKKYSAELKERFAGELDFGAGRVTVDKVVVIPQPLGSLVLASSNRQHEFGRDVAHLVVDVGYFTTDWVYANGFTMDDNRSGGMPGGASQIYQRIASLVARDQGDEVEDIERIDKALREQTPFFFYGTNIDLAPYLEQAQPLISGVVKEMQNNVGRLPNVRSIILSGGGAALYAAVIRRAFPRVLIEVIDAPCLANVRGFLMVGEAGLARERR

SEQ ID NO: 82 - protein, 333 aa, Cupriavidus taiwanensis
MNTTKTIAVDVGYGNTKFAFPLGADVATRMFLSLAPTRSASSLANHGDGYFQSRDVVHVTVDGAEYEVGPDVSITSAYGNTGRTLSEDFVTTPEYAALLFGALHYSQARDVGQLILGLPVHTLQKYAGVLQERFAGTHDFGAGSVSINRVVALPQPLGSLVTFMRQSGKDLDPDDNCLIVDVGYFTTDWVVARGYMMDDTRSGGVPGGSSRIYQQVAQLLSADEGGEPSGSIERIDKSLRDGKLMRYYNKMVDLRPYFEVAKAQCQTAVKEMQTRVGRTEDIAAIVLTGGGSALYSGAIRAAFPRSHIVAMESPCYANVRGFFDIGSARQARG

SEQ ID NO: 83 - protein, 332 aa, Ralstonia eutropha H16
MSTNTIAVDVGYGNTKFAFPLGADVAASMFPSLAPTRSASSLASHGGGYFQARDVVHVTVDGAEYEVGPDVSITSAYGNNGRTLSEDFVTTPEYAALLFGALHYSQARDVGQLILGLPVHTLQKYAGALQERFTGAHDFGAGDVTIKRVVALPQPLGSLVTFMRQSGKELDPDDNCLIVDVGYFTTDWVVARGYMMDDTRSGGVPGGSSRIYKQVATLLSADEGGEPTGDIERIDKALRQGKLMRYYEKMVDLRPYFEVAKAQCQMAVKEMQTRVGRTEDIAAIVLTGGGSALYSGAIRAAFPRSHIVAMDSPCFANVRGFFDIGSARQARG

SEQ ID NO: 84 - protein, 332 aa, Ralstonia pickettii 12J
MKAATVAVDVGYGNTKFAFPMGSETKLNMFPSLAPQAAPRALANHGNGFFKARDVITIAIDGVEYEVGPGVSLSSAYGQTGRTLSEDFVTKDEYAALLGGALRLAQVSEVGQLILGLPVHTTQKYASYLRDRFTGTLDFGGEPVEIGSVICLPQPLGALVTFMRQQNTKFDADNAHLVIDVGYFTTDWVVAQGFTMDDNRSGGVPGGSSKIYQQIASLIEQDEGEPVTGIERIDKCLRDKKPMLFFDKEIDLTPYLEKARSVCQLAVKEIQTRVGRTEDIRAIILAGGGSALYVPAIRAAFPRTPIHALSSPCFANVSGFYDIGSTRPVKQK

SEQ ID NO: 85 - protein, 332 aa, Ralstonia pickettii 12D
MKAATVAVDVGYGNTKFAFSMGSETKLNMFPSLAPQAAPRALANHGNGFFKARDVITIAIDGVEYEVGPGVSLSSAYGQTGRTLSEDFVTKDEYAALLGGALRLAQVSEVGQLILGLPVHTTQKYASYLRDRFTGTLDFGGEPVEIGSVICLPQPLGALVTFMRQQNTKFDADNAHLVIDVGYFTTDWVVAQGFTMDDNRSGGVPGGSSKIYQQIASLIEQDEGEPVTGIERIDKCLRDKKPMLFFDKEIDLTPYLEKARSVCQLAVKEIQTRVGRTEDIRAIILAGGGSALYVPAIRAAFPRTPIHALSSPCFANVSGFYDIGSTRPVKQK

SEQ ID NO: 86 - protein, 333 aa, Burkholderia ambifaria MEX-5
MKTAVFAIDVGYGNTKYAHRAANNAVASGMFPSLAPLAASRSIAGYGDSVLTARKVATIVIDQVEYEVGPDVSLTAAYGNTGRALADDYIRTNNYAALLLGAIHFSGVTHIERLVLGLPVHNLKKYAGALMERFTGTLDFGAGRVKIDKVMVIPQPLGSLVLASSNRKGGFGRDVEHLVVDVGYFTTDWVYASGFAMDDKRSGGMPGGASQIYQRIAQLIARDQGDAVEDIERIDKALREQTPFFFYGNDIDLAPYLEKAQPLISGVVKEMQNNVGRLANVRSIILSGGGAALYASVIRQAFPRVVIEVIDAPCLANVRGFLLVGESSVARER

SEQ ID NO: 87 - protein, 334 aa, Burkholderia multivorans ATCC 17616
MKTAVFAIDVGYGNTKYAYRAATNAVVSGMFPSLAPLAASRSIAGYGESVLTARKVATIVIDQVEYEVGPDVSLTAAYGNTGRALADDYVLSANYAGLLFGAIHFAGVDHIERLVLGLPVHNMKKYSAELKERFTGELNFGAGRVTIDKVMVIPQPLGSLVLASSNRQGGFGRDVEHLVVDVGYFTTDWVYANGFTMDDKRSGGMPGGASQIYQRIAALIARDQGDEVEDIERIDKALREQTPFFFYGSNIDLAPYLEMAQPLISGVVKEMQNNVGRLANVRSIILSGGGAALYAGVIRRAFPRVVIEVIDAPCLANVRGFLLVGESSLARERR

SEQ ID NO: 88 - protein, 305 aa, Burkholderia vietnamiensis G4
MFPSLAPLAASRSIAGYGESVLTARKVATIVIDQVEYEVGPDVSLTAAYGNTGRALADDYVLSANYAALLFGAIHFAGVDHIERLVLGLPVHNMKKYAAELKERFTGELDFGAGRVKIDKVMVIPQPLGSLVLASSNRPGGFGRDVEHLVVDVGYFTTDWVYANGFTMDDKRSGGMPGGASQIYQRIAALIARDQGDEVEDIERIDKALREKTPFFFYGTNVDLAPYLEMAQPLISGVVKEMQNNVGRLANVRSIILSGGGAALYAAVIRRAFPRVVIEVIDAPCLANVRGFLLVGESSLARERR

SEQ ID NO: 89 - protein, 354 aa, Dechloromonas aromatica RCB
MLAARKSIEEPHMDYIVRAVDVGFGNTKYVSNVVGSDIRCTNFPSVAYPSMREPSGQPGYERRKTVAIPVNGLFYEVGPEVELAADTFRATQMHDRYTETPEYTALLRGALALMKQPEIDLLVVGLPVAALTTKKTALEKAVTGTHDIGNGKNVVVRKALAIAQPQGALVDFVEQHGKTTTIEREQSLILDPGSRTFDWLVARGMRLVQNKSHSVNRGVFDILQAIAAEIGHDIGTPYNDIEAIDLALRTGKNPVIYQKPYDISRAMPMAHSIAQQAVASMMRWIDASYSFQNIILVGGGAYLFKKAVKEAFPKHRILEVKDPLHANVRGFQIAGMNHVDKLFSGTATATHGGA

SEQ ID NO: 90 - protein, 344 aa, Bacillus weihenstephanensis KBAB4
MTVDYIGVESANSFVKVASANEELCYLNTLRRVESFEDTTGLTVYTYEGIRYVIGEAQGISSSARNDDRYSSAGYRTETILAISQLVKDGSEIVVGTGLPSEDYKNGDNHEKVKRNLVGEHTVQIDGKTKTFSILRVYTPMQPIGSVVNRIYDYNLKVRKDMESERTARKLVIDIGFGTTDVCEAEGLRIVRYDGVQVGMLEANRIIKDELSKRGARGIVSLLHMDTLLRNAKREYVKDEFTDKEILSKVIIEIGGKEYEIKDLMEQALEYTARIVMQRVDNLGYVLKDYDVVLFTGGSLLALHKYIKPYLTGVNTKAEQGAQTANVKGYTKYAMIQDAKAVAK

SEQ ID NO: 91 - protein, 355 aa, Polaromonas sp. JS666
MPEIVAIDLGYGHTKVVSQGRDGEIKRMIFPSVAPITTRERTAESNGMGALRTVTVCVGANNYVIGKDAYLEADSNYSRSRLDEYSQTDGYHALMLGALALSGLREIDQLVIGLPLTTLDTYHSVMSSKYLGEHSIGATYARRKVELAVRNVLVTSQPAGAMINAVAGQPGLKKATNLAIDMGYFTMDFLMCEGLRPFYKRSGAVQGGMSGYYDHLNGMVAEKITSEGLPAQSTVDHFRLEETLSNGIQGENGRTIYSLRIGKLEVDITECVERASTRLTEYLDRMMTTLGGGSSMGIISSVVLAGGGARMILPAVKERFGKTHDIVMQDAAQYAIANGFLHFGLASAKRAAAQV

SEQ ID NO: 92 - protein, 355 aa, Shewanella sp. ANA-3
MNNPVIITVDVGYGTTTCVHKESLGNYSVKTFPSLPIPIKSDINLGLAGEERDVTNVEVDGITYEVGSDVGTSVGSRNVRVLNTESFITSDRYKALLFGALSFLGKSNHIDIDVLVLGLPVSVMFRKDELAKIYTGTHQITPSRKVTIRQVLVFEQPLGALMSFLRQGGNERFAQCKDKTMLSIDPGYMTTDFITSKGLKVSPNRSGDSETGMSKVIGAVEVALRSQLEGFNIKQINPELIDQAFISGELKLYGKAMKFPKCDLFDVTSAIRSVTDEALTSVVNKVGDGQDIDLIIVSGGAAAVYLPSIQRAFPFHKIEVVDDSLTAVARGLQTAGEQFIRGAIARGDYQKLKAV

SEQ ID NO: 93 - protein, 305 aa, Clostridium perfringens
MLKLGIDLGNGYTKFKGSKFASKTKVGRLASLAGLGEKPKDIHEVGYKGTTYIVGDGEVFTSPDRYFGLDYEICLLTAIGLSSKDIVIDANICVGLPIIYFMSETKVLLEKKLNELTEKDSIKITINGQDKIIKINNARVFAEGAYVLDCMDTDNIITIDLGAGTVNITQWDNLIPISYDTITKSFNKLYRDIANHIKNTGRGVVTPAYIEANFGEDTITIDGKVVDITDTKQMISKYVSAIVSNVYDICDVPQANKIQIFGGGAIATEEYWKDAFGKDRDGVSVLPNSQYTNSKIYQKAAEILK

SEQ ID NO: 94 - protein, 305 aa, Clostridium perfringens E str. JGS1987
MLKLGIDLGNGYTKFKGSKFASKTKVGRLASLAGLGEKPKDIHEVGYKGTTYIVGDGEVFTSPDRYFGLDYEICLLTAIGLSSKEIVIDANICVGLPIIYFMSETKVLLEKKLNELTEKDSIKITINGQDKIIKINNARVFAEGAYVLDCMDTDNIITIDLGAGTVNITQWDNLIPISYDTITKSFNKLYRDIANHIKNTGRGVVTPAYIEANFGEDTITIDGKVVDITDTKQMISKYVSAIVSNVYDICDVPQANKIQIFGGGAIATEEYWKNAFGKDRDGVSVLPNSQYTNSKIYQKAAEILK

SEQ ID NO: 95 - protein, 305 aa, Clostridium perfringens B str. ATCC 3626
MLKLGIDLGNGYTKFKGSKFASKTKVGRLASLAGLGEKPKDIHEVGYKGTTYIVGDGEVFTSPDRYFGLDYEICLLTAIGLSSKDIVIDANICVGLPIIYFMSKTKVLLEKKLNELTEKDSIKITINGQDKIIKINNARVFAEGAYVLDCMDTDNIITIDLGAGTVNITQWDNLIPISYDTITKSFNKLYRDIANHIKNTGRGVVTPAYIEAHFGEDTITIDGKVVDITDTKQMISKYVSAIVSNVYDICDVPQANKIQIFGGGAIATEEYWKNAFGKDRDGVSVLPNSQYTNSKIYQKAAEILK

SEQ ID NO: 96 - protein, 303 aa, Clostridium kluyveri DSM 555
MVILGLDNGYHFTKTSEGVMFSSTVRKGKDIDINADTIQTNIDGQDYVVGAPNGEYVADSNKIDSIVTEICTFTAIAKSFPENKLIDCNIVAGLPVSYYSKQKSDFKEKLLGYGNKKVKLNKHNFQINIVGAEIYPQSAGVVFVNSKDVKSDDSLVVDIGGGTVDVSAFHGLRLTNMATYNLGMLVLYSKLAQKLNSEYECKFMDYELYDKLKKGYITSNKFGRIDLEILNDDIEEHTNVILNNIKRDFNYNSMDNIFVIGGGGVELYDRIKQKFKNAILCDDAQFVNANAFELMGQMKFATK

SEQ ID NO: 97 - protein, 302 aa, Clostridium perfringens C str. JGS1495
MKILGLDNGYNYTKTSKNICILSTVEKGHDDYNNVLEMNFNGENYIIGEPTGQYIVDANKFKTEEGKELLRVTTLAAIGLSYPEESVIDVSIVAGLPVAFYADQKEELTKLIKGLDDSCIEINKLGKKQIIKIDKVMVLPQACGIIIEKNKKNESSLVIDIGGGTWDIAQFTGLKLVEKATYEKGMLVLYSAIAQELNAKYYTKFETSDIQNIIDRKYFTVDGVKKGIEDIEEYIDNYVRKIAATIKRDFDTTNIDNFYLIGGGAISLESYVKKYFPSIEVEKECQFTNVNSFKFMGELKLK

SEQ ID NO: 98 - protein, 302 aa, Clostridium perfringens C str. JGS1495; identical to SEQ ID NO: 97

SEQ ID NO: 99 - protein, 353 aa, Burkholderia vietnamiensis G4
MTKNAAVSEEVGNVVHLQPEGEVRFAGTDDGHDGIKIVTDDWRQIHVPSRITRGADLISLNDADDNVYEGPDGTLYAVSPTLPYFDTTFSDYALSDINLVLVHHALAKAGLGGQRVNLVTGLPVGDYYVANRPNVDFISRKVAHLRENTVRNKNESVALATIVKHNVVSEAIAAFFDLLLDREGNQRDDVAEMVATGGIAIVDIGGKTTDTAVVMNGGRDVDGKRSGTDPIGGLSLNKAVENELKAEFSVTALNPAQVDRAVREGVLRLYGKDHDCRAIIDKQKSELAKQIIAATHRKMRDASDLERVFFVGGGALLLCDQLEELYQHAEFVEDPQFANARGMLKAAMFLQPR

SEQ ID NO: 100 - protein, 316 aa, Yersinia pseudotuberculosis IP 31758
MFSIPSRASYDVSIINIEGNDKSFIFETHNNKKFTVDESVPSPLDTRNIAIPYPVSDLNRVLVHAALINAGYAGKDVHINTGLPVSHYYKPSTEINQTLVEQKKANLMHPVRCGIDGSLPVANIIANEVCSEGVAAYVDQLLDADGNTTEQYEEMYNSVVGVVDIGGHTTDCAVLLPKMVINMTRSGSSEVGVLNLYDGIKTAVAAKFGINSSSITKRQIESALNTGKIMISRQAIDVSDIVNTEKTRLFDQIIMAINEVIGTDEDIEKLIFVGGGSIVFEDYLRDHYKSIIIPEHPEFANARGMMKLVKYIPKSN

SEQ ID NO: 101 - protein, 328 aa, Acinetobacter baumannii ATCC 17978
MGKSFRLPSRVANGRTIIGDTDEVNKQIIHVNGKYFTVDEFTKEHIDTRTEDYPLSDANVALVHHALHQAFDGQYRKFKIATGLPLNRYYGGKDKAKNEKLIADKTQNLLINKDFNNPTVYNLYEHDKKNDPLQILNHIVLSEGQCAYFDALMDDNGKRSSMYEDLWEGGCAIIDIGGRTTDIAMINPRGGTMQASRCDTLDVGIITLKNKVSQNLKEFFGLSSNITDWRLSKALKTGIYNHGGKDHDISKILNAAKVEITDQIENSIKVNVQDGQDLGAVLLVGGGSITLGDELLKRFNYDNWHLVKQPEFANARGMYKCAKYISKL

SEQ ID NO: 102 - protein, 293 aa, Clostridium butyricum 5521
MQNYSISGIDIGHATCSTSNNVLFESKITETEPLNKASKLIIDNKELWLGEGNYDTTYRKVDKKNYINFLYGALALSTDTVYNYIVLGLPLSQYKEDKAALTNLVLNNNEKSVIINGIQKPLVIKDVEIYPEGVVTLDDEWEGIVVDIGGRTTDCAMVINERNRRKIINPISLPLGTINFQTDLIKKINNKYSLDLQVNDAERILKNGLILDGEIIKDDSIEDMYNLFVDKLINQLQVEYSLRTNFISLTGGGANLFYNSIRKQIGENSVSLQENSIYANSQAFGELGESIWQ

SEQ ID NO: 103 - protein, 349 aa, Lactobacillus paracasei subsp. paracasei
MEIFSLDLGNKQTKLKSSKSEYVLPSRYLNQADMPMSVGSSTTNNDLHIYSVPFSDDKYVWGRDIDGLHLDEYLADTIMYGNRYNSEAFKLLANFALGLLASDFKIANNQVLEVVVTAGLPTGDYADQERLRSLLKVLEGQHQVTIDDQIVTVRVRKVYILPQPIGTLYNELLDDQGFIKNKALLDEKVGIVDVGGGTILIDTILNFELSGKNRQQFNTGVNDLYEAIASRIEGDVSLYQLEKELRHGNQQHQWSYRFSKNRQDDITELVGKESDRFTRRLVANVTSTLKNLDSIDTLFFTGGGANLINQKILKTTFTNAAIVKDTEVANVNGFYKYGLSQQVQEKEGK

SEQ ID NO: 104 - protein, 418 aa, Lactococcus lactis subsp. cremoris MG1363
MNIFAIDLGNKRIKMKSERGEYSYPSSYLNAEQVVTGGLGSEIIEQNYHFQTIQDSTNSFIWGPNLEVYNLPERMIDTYARSGRMKQKKTIRIFEFALGRLVMDFPEAFESPLVVHLMLGLSITDMHQESDTIDMLKKLAVGQHQIIIGGRVVTIIIPSEEFLSIIPQYMGTVLNLAFDQDYQRNRRFSDGRIGVIDIGGGTILINRSVALNPSPIGDERFEGIQNLIKEIGRRINSTKSFLIEEMLRSVDSEGNYVYPPNSNVQDSKNVSPIVEGEIERYTRFTVAPLVTENFPDIEEVDFIVVTGGGASLLAKEALKDEIGEEYFSRLLFLNESEFANVRGFYKGGYLKWHSSNEELAVEARREKPAELQESQTRDVIVPPIRNTETSMDRELLEAQQKLQALQSEIDGVQIEFEN

SEQ ID NO: 105 - protein, 369 aa, Desulfitobacterium hafniense DCB-2
MFENDILVAGGDPGFGAIKLDAGDTKVLFPAVICKGNERIFSALGNGNVSRGTDEEMQIGSLDVIVTNHSTGVSRHYFMGSLAESLNPNEAHYCWDEDKSTDEEATALLVVALAVAQKEPKANIYLGTGVPVKYYAALKDKYEAELKGTWSVAFRSGPFKGQTRQLTIIRSRVLPQSYGVFIKETLNEYGIPISPKLFNGYVVVIDPGFRTTDVATFYDGVMLDPPNSFSIEKGLKWAYTGVAEQLKEMTINHANPIETDDKELDKVFRVNEGMYPWNNGAINLNPVMQDMLGQLGTDISREVKKSLKPMLGKIHTVLVAGKVGEMIFEHLQFENKVLIENPQFGNATGFRIMAANLVNNITKKANAAP

SEQ ID NO: 106 - protein, 368 aa, Desulfitobacterium hafniense Y51
MFENDILVAGGDPGFGAIKLDAGDTKVLFPAVICKGNERIFSALGNGNVSRGTDEEMQTGSLDVIVTNHSTGVSRHYFMGSLAESLNPNEAHYCWDEDKSTDEEATALLVVALAVAQKEPKANIYLGTGVPVKYYAALKDKYEAELKGTWSVAFRSGPFKGQTRQLTIIRSRVLPQSYGVFIKETLNEYGIPISPKLFNGYVVVIDPGFRTTDVATFYDGVMLDPPNSFSIEKGLKWAYTGVAEQLKEMTINHANPIETDDKELDKVFRVNEGMYPWNNGAINLNPVMQDMLGQLGTDISREVKKSLKPMLGKIHTVLVAGKVGEMIFEHLQFENKVLIENPQFGNATGFRIMAANLVNNITKKANAA

SEQ ID NO: 107 - protein, 308 aa, Clostridium perfringens E str. JGS1987
MILGLDIGNITSIGVGDKEDFITESRLREFEELDDFSGNDIVEINDKKFIFNEGYFENNVVKHEKENFINLLYYTIAKTLDKENSKENDVKIVIGVPAGQYNSEKERLKKVILNNQCKNIKINGESRTINIEDIFIAPEGYGAKVEALQAKKEKVKLLMVDIGGGTSDVALFDENGRFIGGKSIKVGLLDLYKNVQEVLDLKYKLSVSLEDARKYFDGELDIRNEKFEVENTYKTEALNKLVKFLINELRGLYPNISQYAICLCGGAAGRILPVFKKVYIQAEAITDIKANAKGFRKVGLAKWQNQGK

SEQ ID NO: 108 - protein, 308 aa, Clostridium perfringens C str. JGS1495
MILGLDIGNITSIGVGDKEDFITESRLREFEELDDFSGNDIVEINDKKFIFNEGYFENNVVKHEKENFINLLYYTIAKTLDKENSKENDVKIVIGVPAGQYNSEKERLKKVILNNQCKNIKINGESRTINIEDIFIAPEGYGAKVEALQAKKEKVKLLMVDIGGGTSDAALFDENGRFIGGKSIKVGLLDLYKNVQEVLDLKYKLSVSLEDARKYFDGELDIRNEKFEVENTYKTEALNKLVKFLINELRGLYPNISQYAICLCGGAAGRILPVFKKVYIQAEAITDIKANAKGFRKVGLAKWQNQGK

SEQ ID NO: 109 - protein, 308 aa, Clostridium perfringens
MILGLDIGNITSIGVGDKEDFITESRLREFEELDDFSGNDIVEINDKKFIFNEGYFENNVVKHEKENFINLLYYTIAKTLDKENSKENDVKIVIGVPAGQYNSEKERLKKVILNNQCKNIKINGESRTINIEDIFIAPEGYGAKVEALQAKKEKVKLLMVDIGGGTSDAALFDENGRFIGGKSIKVGLLDLYKNVQEVLDLKYKLSVSLEDARKYFDGELDIRNEKFEVENTYKTEALNKLVKFLINELRGLYPNISQYAICLCGGADGRILPVFKKVYIQAEAITDIKANAKGFRKVGLAKWQNQGK

SEQ ID NO: 110 - protein, 316 aa, Caldicellulosiruptor saccharolyticus DSM 8903
MKCGIDVGFGFTKAASEKGKKVVFPSAVAKTFMTDVGLKPTSDYFVTYMNQTYAVGRAATQCLITETSFSEERFSTDFSKLLVLTALMALECDREVELGLGLPLMLYPKLKEKVKDYFEFSEEIIINSNGIAHSYHITRCEVFPQGVGALFSISSPVEDGIYCILDVGFRTTDVIVVEIRNRNINPLLDMCFTVDKGMSLAIERLGLMIERKYGVSYDTSLLFDIHERSHISVRGRKIDIEAHKKEVFTAIADDIVQSISRRLQRGFDTFDAVLVAGGGAFNVASVLQKEFENVYVLDDSQFANAKGYLTLLNLGV

SEQ ID NO: 111 - protein, 236 aa, Caldicellulosiruptor saccharolyticus DSM 8903
MLVLTALMALESDREVELGLGLPLMLYPKLKEKVKDYFEFLEEIIIDKNGVAHSYHIARCEVFPQGVGALFSITSPVEDGIYCILDVGFRTTDVIVVEIKSKNINPLLDMCFTVDKGMSLAVERLGLMIERKYGVSYDTSLLFDIHERTYISVRGRKIDIEPHKKEVFRAIADDIVQSISRRLQRGFDTFDAVLASGGGAFTVASVLQKEFSNVQIVENSQFANAKGYLALLSLGL

SEQ ID NO: 112 - protein, 333 aa, gamma proteobacterium KT 71
MDALAVGLDDGYAVTKVALATGQLFAVPSRGRIGSAKITAVNQNDTGIAEYMSGDEHIAVGVDDFDATGFDDYPLSAVNRAIVQHALLAAGLSGRSIHAVSGLPVARFYHSDGQRRDALIASKTKSLLAPVQPLDGRPPVSIACHDVIPEALAAWYDHVIIEDGTEWVRLDESAVEAPLAIVDIGGRTTDFVVVADEKLWHQSSGSITCGLLDLRGSVAEAICAVHDLDSLSDAGVDQALTENTIRLFGKDHDVTAIVSKARQQIVLRIEQETRRRLGRGAELERVLFVGGGSVVLADAIRHWFPNQAIAPHPAFANARGMLKYLRYVGLPSE

SEQ ID NO: 113 - protein, 363 aa, Nitrosococcus oceani ATCC 19707
MTELTDEKTTDQRQASIADDPMQVVQVGLDDGYAYTKVALPDGRLVSVPSRARMGAAGVTWIRDVEQRIFEYETAGTVYSVGAVDGEPTQFDEYPGSALNRVIVQHALQEAGLSGRSLHLVTGLPVAAFYRGDGQQRRQAIQTKRDGLKLTVEPVVAKKSSTRQALKASIAFHEVIPEALAAWYDFVIVTLDDGVTLDADRLNAPIAIVDIGGRTTDYVVVQDQGVVHGSSGSLNRGMLDLKLRVANLIQERFDLHELGEQIISRAVDTNRLRLHGKDHDVSDMVMNAKRELVERLYAETRRKLGLGVELDRILFVGGGSAALSSDIADWFPNQTIADHAAFANARGMLKYLQFVCDDASKER

SEQ ID NO: 114 - protein, 363 aa, gamma proteobacterium KT 71
MTERIDKKPTQADKTSQLTSDPMSVVQVGLDDGYAYTKVALADGRLFSAPSRARIGSAGVTWIREQEQRIFEYETGGTVYSVGAVDGEATQFDEYPSSALNRVIVQHAFQQAGLSGRSIHLVTGLPVSAYYRHDGQLRQQEIDRKCESLKLSVEPKPNSAKPGKSILSASVAFHEVIPEALAAWYDHVIVTQADGVTLDGDRLSAPIAIVDIGGRTTDFVVVQDQGIVHGSSGSLNRGMLNVKSRVADLIQQTFDMSELGEQSIARAVDSSRLRLHGKDHDISAMVAAAKRELVELLYAETRRKLGLGVELDQVLFVGGGSAALATDIANWFPNQTIPDHAAFANARGMLKYLQYVCDDTAGG

SEQ ID NO: 115 - protein, 346 aa, Marinobacter aquaeolei VT8
MKTKRRAIDNGYNHHKVAWVEDGKIKTIKYPAILGSSTEAMTELGGGYANMYESTSGERFVVDEHVSNRISLRTGDYGLTEGNRVLVNHGLRETGIKPDDEVMLVTSLPVRDFFSSDGSRNEDLIAGQKESMMKPVKVVLNNTDDPVRVANIVRSDVVSEAVAAAFDFLVDNVGESAKPLHAPLAVLDFGGSTFDVVTLTKDLRIRHASSGTLKRGTMDIIEPLKRLLLKHAQEMKIKVSEIPDWMINQVMATGKMPYFSYEDGKPKNTEMPVNDVIEAAAAETVSEIKAFVKQKIANFSEYQAVLLVGGGSLLCRKLFRDWEELPQFIVMDEFANARGMLKLVSI

SEQ ID NO: 116 - protein, 346 aa, Marinobacter sp. ELB17
MKRPLSIAVDNGYYDHKVAYWDGDVIRTFKYPVVIGSKHEVMSTMDGQLVGMYETEGVRLVVDPTINNKIPLRYDEYGSSKENRTLVSHGLYKAGVAGGQEVHLTTALPFRDFYNIDGSLNRPLIDAQKANMLVPVSLVASSDGPLDPIANVTQSRVMSEGVAAVIDYLVRDNSGQARKMRAPIAVMDFGGSTFEVVTVMPNMNIRHSSSDTMKRGTYDIRTSFAPMLADYLRELGFKMKHAADWMVTEAFETGSIEFPGVGIDAGNRVIPVKHIIEEAAKPIVNEIKKFTQAKLPNMAEYEAILLVGGGGLLTESLFEDWKEEFGLIVVDEYANARGMLKVALIA

SEQ ID NO: 117 - protein, 350 aa, Leptospirillum sp. Group II UBA
MSKTKPVRSPEQEFSEEPVIDVGLDDGYAAIKLAWYGPDGTLRTHSVPSRARSGSLGVGSLFGDSALSVGGYETEGERFTVSPGLEGEVTRFPDYNLSPLARVLAHHALIAAGFAGKQVRIASGLPLDRYFRDGKEGKRKDEHRIARKIESFARPVRRLDGTGTARIVSHSVFAQGLAAVVDWLVEGTTIRSQKDPVGVVDIGGQTTDISVINPDFQANHGHLKTCDLGVLDVRDLLGRRIQSSHDVDKISDSALDAALTTGATRIWGKDVSVQDELRDAIREIESRLANEILSVFGKEASTLETILFVGGGSLVFRNLPTRFPNAAVVDCPEFANARGLLKALSLSGRS

SEQ ID NO: 118 - protein, 293 aa, Heliobacterium modesticaldum Ice1
MIKLGVDNGNYNTKSSEGMLYASGYTASDKEFITPDMQLFYEGRYYAIGERRMRFQQDKTREPDTFMLTLPAIADAMKHAGTTSAEIALGVGLPIGSYGTQKEAFRRYFLRDNVSFLFEGTSYRCRIAECKVFAQGHAALCRYYPQLKDYRSITLVDIGGYTVDILTLHDFRLDRSSCASLRMGTITLYSRIQDTLQRNDILLSDELITDAIRGDIQHADSKLIHAVVEQAVVAYCKELLNALRERGLDLRLPTVFAGGGAELLELMLRRSDINTVAVLNRFANADGYKLLMG

SEQ ID NO: 119 - protein, 293 aa, Desulfitobacterium hafniense Y51
MIKLGVDNGNYNTKSSEGMLYASGFSVSDKEFVTPEMQVYFEGKYYAVGERRMRFQQDKTKEQDAFILTLPAIADAMKKAGMTYGEINLGVGLPIDSYGMQKDAFRRYFLRDNLSFRFEGEFYRCRIVECKVFAQGHAALCRYYSQLKNYRSITLVDIGGYTVDILTLHDFRLDRSSCASLRMGTITLYSRIQDTLQRSGIILSDELITDAIRGESQHADSKLIGAVVEQAVAAYCKELFNALRERGLDLRLPTVFAGGGAELLKPMLYRDDLNAVAVLDRFANADGYKLLMG

SEQ ID NO: 120 - protein, 322 aa, Syntrophus aciditrophicus SB
MQMNLGLDVGYGDVKAVYQREGILEMLKFPTAIAYAEREVGDLSAFAGGEEYEYRGRKYFVGREALVGAFSTRSFEFMKRYSPLFVFKAVKKIHRRTGELVTDVAMGLPLSHYTEANLKELVPLLQRIEVGREVLELNARFYPQGLGVLADYRLSQAGDVNARTDRDMIILDIGFNTVDVIVVERGRIVKGESDTLERHGVSKISLDLAREIKVRMQLDLSEQESKDVLRQGRIRVYGAERDLAELVRESAEKYMDWLIQEVHSKWMARIQRAEKVIIAGGGAYYLQEHIPEEYLPLVHVPDHPEYANARGFLKALDVESGK

SEQ ID NO: 121 - protein, 340 aa, Burkholderia vietnamiensis G
MQNQTIIGLDVGRSAVKATAFASGMFYPLTFPSIVSPAIDLTDESTARKAEAETIVVAGRRYFTGDTARLQGSAGTTVGLSHNWTSTPEYLALVGSTMKRFAAKGVPGLTDPLLVIGTPASLYGSQQEQLKAETLKIVQAEIRVLPQPMGAYCDFYLDKSGVPVKTHMQDDAGRKKSWAVIEVGHFTTDFLLMLEGQYIERGASSCEGLNFAAEHLLRILNAKDIHSNLIECELAIRTKTILQYGRDVDIAEEVAEAVSHVAQKIISKADSLLSTDVRKLHGVLLAGGGAPLLYDELSKKWPHCMLLDNPRMAVANGFCRYGMGIALRRAMRSQQESVNV

SEQ ID NO: 122 - protein, 348 aa, Clostridium novyi NT
MSKGNNIVDSFSVQVIDDGYADTKSRGEDTNMIVTPSYVTSWRPSYNKDNDLQEEKIDKLSRIEVKVNGSKYLVGQCAVKQDRNIQWNGAADKHDDTSFDILLKTHLSLLNKKPMSRVKLVMGLPVSASLDKERIEKMKAKVLRQHNSALRLYGDKDFQNKIVKVEDLIIKAQPHGTLCDLILDSSGNLTNKDLARKVNAISDIGGKTHNLYLVDALEPLSDFCDTKNSGMYIAYMWIKNYIEQELHLNVSDGQIQYIVASGQIKGYDLTPVIQKAYRSLARKIILEIRTVWENAFPFIDNIIFTGGGATVLKPYLQEEFKNAMYLTRNQNASGLFKQGIRKWKRKAV

SEQ ID NO: 123 - protein, 348 aa, Clostridium botulinum C str. Eklund]
MSKGNNIVDSFSVQVIDDGYADTKSRGEDTNMIVTPSYVTSWRPSYNKDNDLQEEKIDKLSRIEVKVNGSKYLVGKCAVKQDRNIQWNGASDKHDDTSFDILLKTHLSLLTKKPISRVKLVMGLPVTASLDKERIEKMKAKVLRQHNLGVRLYGEKEFQNKIVKVEDLIVKAQPHGTLCDLILDSSGNLTNKDLARKVNAISDIGGKTHNLYLVDALEPLADFCDTKNSGMYIAYMWIKNYIEQELHLNVSDGQIQYIVASGQIKGYDLTPVIQKAYRSLARKIVLEIRTVWENAFPFIDNIIFTGGGATILKPYLQEEFKNAMYLTRNQNASGLFKQGIRKWKRKAV

SEQ ID NO: 124 - protein, 297 aa, Clostridium beijerinckii NCIMB 8052
MRISADIGYNTTNFIGHNIEGSFSSTVKEKMHELETAKYTVEYNNKTYLIGNDDGFTSIEHSRDKDIIFHICLYTAIAATMSSTIDNNVRVITGLPAQFFAEQKNSLIKALENRRVFMKLNGENRSFTITKVIVFPQSAGLFLYDKSLVEKDTLVVDIGGGTLDIAYMSNGQFKEGRTYPLGVNPTYDVLLQELTKYGVNYSNRMKAEQIIADKAIFVEGKEIDVSKDIDNVLSLRAGEIINAIKQAFPEQSKYSRFVFIGGGALLLKNYLKDYRVLDDAQMINVKTYDIIGKSKNV

SEQ ID NO: 125 - protein, 348 aa, Moorella thermoacetica ATCC 39073
MLAIQTNPQPAALAIDVGFGYTKAVSSTGGKVIFPSVVAPAGSPDAFDRLDKSDTGYRVRIKKGIDGLLEEWLVGELALKEGREVQYFQDWEKHSHPAHDAVLLAAAVLTWNWPRAGSGIMGISNPALVVGLPVDVWRDELQREGLKKHLAGLAAEVSVNGNDPVRVTFSRVYVYPQAAGAFLTVPDLPDSGIVALVDVGQKTTDSAAIEIVNGRQRLVKTMCFSINKGMAALVEAVREEFRRQTGAPLPPQQAWETVKSGSLWYRGKQIDMAPAIKKARSEIARAIADQVLAGWGERADFVRKVYLAGGGILDLPDLKNMFPAAAVLPGPQWANALGFLKVARGLAV

SEQ ID NO: 126 - protein, 316 aa, Desulfotomaculum reducens MI-1
MSKVVAIDFGYREIKGVNSEGLEIKFPTAMAPYVKHPTAEGLEEVVTVTKPGYEPEMYFYGQKALDETGVGFTNDRDKHLHSGHDILMLAAARKLGYENGDTLVVGVPISYADQREALKTQLERLHGDVSVDGGKPKRISFNDVLVLRQGIVVFGLIPDLPNGTLISFDIGEHTTDVSTVKFKNGVIEPNPSKCFSLEYGYSKVVEAIQKEFQSKAGSPVSGEQARAIAEEGYVIYKLKKLDMTLEVLRAKEEIAKNIVKDAKKRLGEIADFAAGFYLCGGGADVLPLKELLPGAVIVDNPQTANARAYLQLAMSE

SEQ ID NO: 127 - protein, 369 aa, Heliobacterium modesticaldum Ice1
MNMHAARLRQLPGFEPGEGKNLTVGLDIGFGYVKVVAGNGRWALFPSIVGEGRELHILSGFGSNDPIDNLVVDVDGRRYFVGNLALRETEAELDIDPDKIFNIDFEVLVYTALALVSDKSDQDVNIYLGLPINFYRTQKARFEDKLRAHQMSRFVKILGQDVRLIRIGNFEIFPQAGGAIFNQILDFRSEVRTPRLARGKIGIIDGGTKTTDCIYMEDLKFVDQRSFSVNDGGTHKILMDIRDFLMKNFDHYYPRLAEVDQMLRERKVEVKGKVYDLSSVIDASASRVARKIVREIAAKWPNHMEFRAMILVGGGGYVMHPFLKEIFPDILLVQDEFEGEAVTGGWNVIQFANALGFLKLAVMRYGEKK

SEQ ID NO: 128 - protein, 310 aa, Clostridium leptum DSM 753
MNKTMNIGIDHGYYAIKTRHFSFPAGISEYSHEPYTLQNTLEYGGKFFVCGTGRQPILRNKMENENYYLLTLAAIAKEIQQRGAKTECSVTIAAGLPLAGFGREKKSFREYLRPSSQPVSFQFEGIPYKVTIEDVKLFPQGYSALMIHPELLQNEPSVLLMDIGGWTVDLMRLDNNVPNAATCRSLELGMIRCIDEVKEQVRRDVGLSVTDAQVERVLAGKPCSMDEDARGIIQKQGRLYTERLLSAAMEAGFDLKAIPVVMLGGGAAVVKRNVAPQDGLCRVFALLDDRVNAEGFERILGRLSGGVGKG

SEQ ID NO: 129 - protein, 301 aa, Clostridium difficile QCD-37x79
MSKLGIDIGNYAVKTSTDDIFESKVTEVKNFGSDSDSIKIGNKTYYLGEGDEEINIVKYEKENFLPLLLGAICRNTDDEVIDLALGLPVKQFGGLRKDLIEKLQGKEYHVEFEKGNETTKRDITIRSVQVFPEGVTGYLYYAKDIVDQIAGRDVVLVDIGGKTTDIALVQGNKATDPYSVNVGTINIYDAIKKSLEMDERFLGKVEIKREKIQDYIDKGFYLNGEKQDIKKNIDASVGLFKQIYNELKLNYPISTSAVVVMGGGAKLLGEAFKKNIPGIIVMSDVDKHVFANAKGYKKMMK

SEQ ID NO: 130 - protein, 303 aa, Clostridium perfringens E str. JGS1987
MKIIGLDIGNAEVNTSEGVHFPSRVKIGVNNMNKDDIKVNFEGLDFTIGQGSNNIGLNKYKNINFKISVLVGIAKSFKENDIECNVVIGCPIETFNKNKEIVKDIKGIIESWGKQTIVIEQGESKEIKVIDIKNVAIFCESGIVFKNRERFSKEKTLVVDIGGGTRDDSLWNGLDLVECKSNDKMGMINLYETIIKEVNRRNKSNLNFDDAKAMIGKKEYKINQEIVDISYIDIIIENFVTGFMSEINQIFPFSNVDSIQFVGGGAILLKEYITRLIPKAEVPNNAEFLNAETYREVGELMWS

SEQ ID NO: 131 - protein, 389 aa, Bacillus anthracis str. Ames
MSILLKAGADAGNNGLKLMVKGQDPIFIPSIYALYIGEPTGLLDEGDVSLSELENHIDVTISSPSLMLNNVRYIVGEKVIQDQLKGTEVEKKSNKSTDELMVITILSGLAVSAMRQSPTSSHINIRYDLSVALPMQLITQEIAAENAKRYMGNHKVVFHYPNGRDVTINISIEYCKCLPEGASGTWGIVYDEEGNVVKHKIECEQNKVSEIDFVDKTLLSFDIGAGTTEEVVSLGVNFRPQLSKGLSYGVKETLLQIITRWNRKYPTKTIDSITEFNQIYLNDKHPRNALLVEESQPALLGLAARVATDIINKIDDMKDDPYVFIYGGGAVIIKNSLKMILKQKGRLTNVIFVDNPLFTNARGLLVYTCSPKYREHKQKELGFTNLTIS

SEQ ID NO: 132 - protein, 385 aa, Bacillus cereus AH187
MAILKAGADAGNSGLKLNVLGLDPLFIPSIYSHHIGEATNILSDEDISIEELENNIDVTISSPTLKANNMRYIIGQKVIDENIKGIEMEKKSDKSKDDLVLLVTLAGLAISAMKKHPNKNKIDVTYDLSVALPVATITPQTAQGFVERYMNHHTVKFHHPSGREVVVNIQVEFCKCLPEGAAGSWGIVYDEKGKTIKRKVETTEDKTTEIDFVDKTILSFDIGAGTTEEVVSHGVSFKHKMSRGLPYGVKETLLDIIKVWNLNNKQKTIDSIAEFNAIYLDSEHPRHIRLKEASRGALLGLANRIATDIINKIDDMKDDPYVFIYGGGAAIVKESLQQILEQKGRLTNVIFLKDPLFVNARGLLVYTCSPRFEELKEKALAPVGE

SEQ ID NO: 133 - protein, 407 aa, Bacillus cereus H3081.97
MSNVKEKEDFLREDEELEMLTKAYKMDSAFDVGNANVKAKINGKVLKQPSVIQYLLQQPPVTETNLTKLVSNLEDELTVHITSNAIKRSGLYNIGKRATITSDANVENMNIKLGNKYKHTIPVVMTLGMMACESVKQAFSEESKLPSTINIKSKLSTAIPMSEYTVDKAKFLEDRFTNNKHIVIVYVGGESVTVSITFEKVKVTKEGVPPLYALIEGEQAILDIYNEQYQEKAVPKDFVNKKILHADIGDGTTEYVYTVGLNPVPDNCTGERRGVGHATESAIALLKEDTNGRVLLKRQQYMNILKDPSHRLFDEASRFLENGKYIQAMRILEDIQEKYTEKIAGDADIICVYGGGSIEFESLLYDDLLEFCEEVNCKLLWIPEKYAVDMNMEGLDILNKKVFFKKG

SEQ ID NO: 134 - protein, 383 aa, Geobacillus stearothermophilus
MKLVVANDIGNSETKMIVNDTLIKQPSVVKRLLSKPNVMETNVEKNIANLLDELIVHVTSNAMKRSGLYFIGKRANMTADKVENMNIKLGNKSKHDIPVLMTLSMLAARSVQLAYQENQELPSSISVDVSMTTAIPASEYSADQARYLEGRFTSNDHVVIVYVGETPVTVTLHFQTVKVTQEGIPALYALLESENEILKNYNEHYKKQAVPKDFANKRILHVDIGDGTTEYIYTVGMNPVTDVCSGEKRGVGHATEEATQLLKEEVGGFLNLNRQQFMDIFRDPSHNLHDLAVRFMQEARYSQAQRILEDIQEKYSDIAGNVDVIAVYGGGSIQFKEELYEELLDFANTVHCEVLWIPEKYAVDMNVNGLHVINEKILFKQHA

SEQ ID NO: 135 - protein, 381 aa, Clostridium perfringens E str. JGS1987
MCIYFKVGNDNGNSEHDIIINDKLIAQPNVYSKVRKLPNLDEVNKEYVLEHIEDNLIVTCEDPSGIYYIGNYALSSGQKIRNVEVGIDNNKLESEVIVINTLAQIAGQAVKEYYLKNKSFGDIIKVKVDMATALPISSYSNKNAKLFSEKFTNKKHFITVHIGNEVARVEIEFEFVMVIPEGVTSSFLFIQTDDALKKYNFKKEFFKNAKVLHVAIGEGTVEYPITKGIEFNPNFIKGSNNGVGHAIDMALDEFKETKGLIKFSRQDYSEVLKNKKHKYNELAEDIIEQYIEEQAEEIFHNATKEIQKANNDIDVVCIYGGGSILMRSALEEKFKKFCDRADIKLLYFDKEDCVTLESLGLNVLVNSKLFKTLKQNSTVKN

SEQ ID NO: 136 - protein, 395 aa, Bacillus sp. NRRL B-14911
MVDLKNPRIAAVDVGNDSLKALFGKLDYELNIPNVIARDVADRPVIGIEELDSKEPLDGIHVKVHSPALKDNNAIYRVGTLATKSDNASELDPGSSKSEEDQTLVMLFVSLALDAVREENAGLFPKNNNIIDTNYILGTGLPLREVKEGKDAGYRSKLLGSVHQVEFLVTPKYQGIKVNLKFSDVKVYPEGFAAFINLVMDNDLNIINKELIDKRILIQDIGGLSTDIAVIKNRTVDDDKAQGFNLGVSESLEMIREEIRSKHGVELDSRRDVVEIITKKNDRNHIMVKGSRTSVHDITDRILFDLAKKQYRLLRNVWQKNSQTEICYFVGGGSAVLKEYIKSLNNSLDGYNIDFFEDEKESIWMMANAYYKLVADHLKRTSKPDKQDEKKPVKA

SEQ ID NO: 137 - protein, 383 aa, Geobacillus thermodenitrificans NG80-2
MKLVVANDIGNSETKMIVNNTLIKQPSVVKRLLSKPNVMETNVEKNIANLLDELIVHVTSNAIKRSGLYFIGKRANMTADKVENMNIKLGNKSKHDIPVLMTLSMLAARSVQLAYQENQELPPSISVDVSMTTAIPASEYSADQARYLEGRFTSNDHVVIVYVGETPVTVTLHFQTVKVTQEGIPALYALLESENEILKNYNEHYKKQAVPKDFANKRILHVDIGDGTTEYIYTVGMNPVTDVCSGEKRGVGHATEEATQLLKEEVGGFLNLNRQQFMDIFRDPSHNLHDLAVRFMQEARYSQAQRILEDIQEKYSDIAGNVDVIAVYGGGSIQFKEELYEELLDFANTVHCEVLWIPEKYAVDMNVNGLHVINEKILFKQHA

SEQ ID NO: 138 - protein, 379 aa, Clostridium perfringens D str. JGS1721
MCIYFKVGNDNGNSEHDIIINDVLISQPNVYSKVRRLPNLDEVNKQYVIENIENNLIVTCEDPSGIYYVGNYALSSGQKIRNVEVGIDNNKIESDVILINTLAQIAGQAVKEYYLKNKSFEEIIKVKVDMATALPISSYSNKNAKLFSEKFTNKKHFITVHIGNEIARVEIEFEFVMVIPEGVTSSFLFTQTDDILKKYNFKKEFFKDAKVLHVAIGEGTVEYPITKGIEFNPNFIKGSNNGVGHAIDMALDEFKETKGLIKFSRQDYSEVLKNKKHKYNELAEDIIEQYIEEQAEEIFHNATKEIQKANNDIDVVCVYGGGSILMRSALEEKFKKFCDRADIKLLYFDNEDCVTLESLGLNVLVNSKLFKTLKQNSAV

SEQ ID NO: 139 - protein, 395 aa, Bacillus thuringiensis serovar israelensis ATCC 36
MASLKGKTLHIDIEGDIGNDSFKGYINGEYIKMKNVYQSVYSMPNVTETNIQKNVVNLVDNMFVNIASKSIRRSGMYFIGNRAMLTGKNPKNMNIKVGQKYNDDLPLINMLGLIANKSVQLEWERTEQLPQSINVTVDLISAIPASQWTPVNAKHLEQRFTNSNHVVVVYVGEEQVTVSLTFNSANITQEGVPPLFAILEGEEEMFTDFTKLYAKKLEIKKIDGAFFKNKKILHSDIGDGTTEYIYTVGVNPVIDACSGERRGVGHATEEAVKLLNQERGTNIKRQQFSQILQDIDHKYHEEATTHFNITKVEQAELILEDTDEKYVNNTASEAEVLCVYGGGSITFKDELYNQLLEYCERVGMYLLWIPEKYAVDMNAKGMQIIKKILSRKKVK

SEQ ID NO: 140 - protein, 400 aa, Bacillus cereus AH1134
MAEKNLVSEVKEVESVVEKKVVAEADLGNSNLKIFINDKYLSVPNVFQRVHGGVDSYETDEQKNVINLLDDLHVHVTSEAIERNGSFFVGKRAMRNSEKMKSMNIKVANKHEEDLPVINTLSVIAANVIQSVYEEAKSVPDLLKVELDLMTAIPASQHNPKTAEILSERFSSNTHVVIVYVGKKAVTVQIECSRVRVTKEALAALYAITEGPDEMFEEFQELYAEQLNNEKITGKFFKDKKILHGDIGEGTSEYIFTDGLSPVLDSCSGARRGIGHAIEEACNLLNKDRKTNFKRQQFTEIMLDKNDKYNEDATEFIYETRYEQAELIKEDLEQKFINDTGGRAEILAVYGGGSIALKNELFNKLKKFCETTGMMLLYVPEKYAIELNPKGMNVLRKIID

SEQ ID NO: 141 - protein, 399 aa, Bacillus cereus AH1134
MAEKNLVSEVKEVESVVEKKVVAEADLGNSNLKIFINDKYLSVPNVFQRVHGGVDSYETDEQKNVINLLDDLHVHVTSEAIERNGSFFVGKRAMRNSEKMKSMNIKVANKHEEDLPVINTLSVIAANVIQSVYEEAKSVPDLLKVELDLMTAIPASQHNPKTAEILSERFSSNTHVVIVYVGKKAVTVQIECSRVRVTKEALAALYAITEGPDEMFEEFQELYAEQLNNEKITGKFFKDKKILHGDIGEGTSEYIFTDGLSPVLDSCSGARRGIGHAIEEACNLLNKDRKTNFKRQQFTEIMLDKNDKYNEDATEFIYETRYEQAELIKEDLEQKFINDTGGRAEILAVYGGGSIALKNELFNKLKKFCETTGMMLLYVPEKYAIELNPKGMNVLRKII

SEQ ID NO: 142 - protein, 428 aa, Clostridium perfringens E str. JGS1987
MTVKEEKIMKMSNDNGNGDSKIIVNGALTIQPNIIHKKGFETPETGGWNISKIKNLKNNLIIGVFEKPEINFFDEEDTEEEVESIYFIGSYALQSGLKTVGLNIDVDEDKMKNPITVISTLGYAAAQAVKERVLDLEKSLGRPFAIEDIDSIGDLDLKVDLTTSLPARIYSLDKADTLASKFKNKEFKLKIYVPNNKFVNVKIKFNNVGVVSEGVTTVYYLANIKNNIFDEFNKNNDDVKIDNEFFRNPNNTILHVAIGAGTTEYPRTNGYDWDDVYKTGSKNGTGHAIKDALKVLDKIDGTQNIRNPKAIERILKNKGKEKDGTKNLFYNEIKKSLTMPLMTQVDEIMDHIIEELNRGPQISLVVIYGGGSILMKPILKKRIMELQETRRLKFLYIPEEYAVNLEAYGLYTLVSSPDFAGNSSLRSK

SEQ ID NO: 143 - protein, 389 aa, Bacillus cereus AH1134
MSILLKAGADAGNNGLKLMVKGQDPIFIPSIYSLYIGEPTGLLDEVDVSLSELENHIDVTISSPSLMLNNVRYIVGEKVIQDQLKGTEVEKKSNKSTDELMVITILSGLAVSAMRQSPTSSHINIRYDLSVALPMQLITQEIAAENAKRYMGNHKVIFHYPNGRDVTINVSIEYCKCLPEGASGTWGIVYDEEGNVVKHKIECEQNQVSEIDFVDKTLLSFDIGAGTTEEVVSLGVNFRPQLSKGLSYGVKETLLQIITRWNRKYPTKTIDSITEFNQIYLNDKHPRNTLLVEESQPALLGLAARVATDIINKIDDMKDDPYVFIYGGGAVIIKNSLKMILKQKGRLKNVIFVDNPLFTNARGLLVYTCSPKYREHKQKELGFTNLTIS

SEQ ID NO: 144 - protein, 389 aa, Bacillus cereus ATCC 14579
MSILLKAGADAGNNGLKLMVKGQDPIFIPSIYSLYIGEPTGLLDEVDVSLSELENHIDVTISSPSLMLNNVRYIVGEKVIQDQLKGTEVEKKSNKSTDELMVITILSGLAVSAMRQSPTSSHINIRYDLSVALPMQLITQEIAAGNAKRYMGNHKVIFHYPNGRDVTINVSIEYCKCLPEGASGTWGIVYDEEGNVVKHKIECEQNQVSEIDFVDKTLLSFDIGAGTTEEVVSLGVNFRPQLSKGLSYGVKETLLQIITRWNRKYPTKTIDSITEFNQIYLNDKHPRNTLLVEESQPALLGLAARVATDIINKIDDMKDDPYVFIYGGGAVIIKNSLKMILKQKGRLKNVIFVDNPLFTNARGLLVYTCSPKYREHKQKELGFTNLTIS

SEQ ID NO: 145 - protein, 389 aa, Bacillus cereus NVH0597-99
MSILLKAGADAGNNGLKLMVKGQDPIFIPSIYALYIGEPTGLLDEEDVSLSELENHIDVTISSPSLMLNNVRYIVGEKVIQDQLKGTEVEKKSNKSTDELMVITILSGLAVSAMRQSPTSSHISIRYDLSVALPMQLITQEIAAENAKRYMGNHKVVFHYPNGRDVTINISIEYCKCLPEGASGTWGIVYDEEGNVVKHKIECEQNKVSEIDFVDKTLLSFDIGAGTTEEVVSLGVNFRPQLSKGLSYGVKETLLQIITRWNRKYPTKTIDSITEFNQIYLNDKHPRNALLVEESQPALLGLAARVATDIINKIDDMKDDPYVFIYGGGAVIIKNSLKMILKQKGRLTNVIFVDNPLFTNARGLLVYTCSPKYREHKQKELGFTNLTIS

SEQ ID NO: 146 - protein, 469 aa, Corynebacterium glutamicum ATCC 13032
MTSAVNVQKKTTQKVLKPINTKNYSATDAVQTGQHGSALGSNIGVYTYTAGLDIGNGYVKGIIEATGDTTGTSVDVIDMPSAATRMSRPTEVPEPDDTAVAVTGADFFNHIDTNFNSPMVKGNYRYLCGTRSLSARGSLEEFDLVGNRSKAEQELSKVLVMAVLAAKAVKDFVAAHGRIPQVAVEGDPGVLRVHTYLALALPINEYVGHRHGYKAQFMGDGAANPAVHVVTVNNFETPATVQLIFERVEVIAEGASAQYAITAGGEVLMNGMLADVRSKGLALEGVTAGDVLQARHTIGVDVGEGTVNFPVFTDGRFNHDASRAYDKGYGTVLESAIQAMDDAGLAHNFNSRKQLADYLQRPPSALKRNFYTRVEQHVDQEAVFFVQDVAAEFARVLSDVGALTEVAFVYGGGSGPLRDRLHEALLIKAAEMGSEDTFPVLYLDSAYSRKLNREGLMIAARSIAAKARK

SEQ ID NO: 147 - protein, 409 aa, Lactobacillus salivarius UCC118
MSKNNILKLNVANDLGYGSVKAKVEDTNIHFPSVIAIQREQDLNKPVEFNSNQEKLTYLEGMINHMDVTISSSAVKTQGRFLVGNAAIKSSLPLKAFDVNDFTGKSDNDLAIILTLSMIAAQRISLAVKNGEDLSDQLSTEINMTTALPVSEGKKNGIINNYVNKYISSKHTVVFHNFKDPITVSLNFKNVYVALEGEVAQLYLKNSDIKLQGLIKQDFSKNYPELANDIKVSDLVKIDNLLGIDIGEGTTDLVVIKEGHANAVASTSLPTGYGNALQDAIDVLQTENMNFEARSQLQDYLAQEVSPLAKRMQTKVRQIVFEQLEPFADKIVTAASKTMRKAGANVEILYVYGGGSIPMLEQTALRQKLSQKMKDFSGGIDVPVIWINKSYAQNLNEKGLELILKAMNK

SEQ ID NO: 148 - protein, 324 aa, Vibrio cholerae MO10; identical to SEQ ID NO: 31

SEQ ID NO: 149 - protein, 275 aa, Bacillus anthracis str. A2012; identical to SEQ ID NO: 50

SEQ ID NO: 150 - protein, 364 aa, Trichodesmium erythraeum IMS101; identical to SEQ ID NO: 64

SEQ ID NO: 151 - protein, 310 aa, Nostoc punctiforme PCC 73102
MINIYCADIGNYSSITALKGEKPRVMRSVFQDVTYTSARDLDTDNSPSIKLDDKVLVLGDRATKQKNSQTAAERGKDLPEFFKPFTLAGLRQDFDGVVRFLVPEHSQWHEDTIRRTLVAEHQINVNGTNYRHRIKNVEFFLETDVAVINAYRNGKLDMDGDTLAIDIGGGTTNYVVITPSSEVLTRRSIPKVGGVSLANDIINSDLMQSYAKRDNVAFKVAKMMDAIADGSFTYGRKYDFSSVFPGLLENWFNNLMDSISTAANDYLADVTNVMLIGGCANLVRQKLSAKQGFYIPANPQLSNIQALLAM

SEQ ID NO: 152 - protein, 389 aa, Nostoc punctiforme PCC 73102; identical to SEQ ID NO: 65

SEQ ID NO: 153 - protein, 389 aa, Bacillus anthracis str. Ames; identical to SEQ ID NO: 131

SEQ ID NO: 154 - protein, 355 aa, Shewanella sp. ANA-3; identical to SEQ ID NO: 92

SEQ ID NO: 155 - protein, 353 aa, Burkholderia vietnamiensis G4; identical to SEQ ID NO: 99

SEQ ID NO: 156 - protein, 340 aa, Burkholderia vietnamiensis G4; identical to SEQ ID NO: 121

SEQ ID NO: 157 - protein, 340 aa, Bacillus cereus G9241
MKSLYAIDVGIGFTKRAYRQDVDSEVTIKSEASTLAPIPNHAESEDLTKVSFIDLDFAYYMGNEAHQSDASFLPPFDEEIENYYESEQFKQQIFGCIAKDYKENVVLPLVVTGLPVTDFGSQHEQLQRALKKETSVQIDGKFITITVENVLILQQPVALHAYFLKEGIIQEQDRILIIDGGFRTLEMTDMKQNVILNHYETELGCSKPLKNIKNILQNHAGESNQLHINDMPNILEKGYGGREENPQTSQVHTLIQKELDAHFQDVMRVLQEQFKLEQYDTIIWTGGIVDLHKKRIEKIQGEISSFRMVDASKEAALHGYYMIGSQVFDDITNQSVYESK

SEQ ID NO: 158 - protein, 337 aa, Methylibium petroleiphilum PM1
MLTKTIIGLDVGRSAVKVVAFANGLYYRLTFPSLVSPAFPINDEGTAARAELETVEVLGKRYFTGDTARLQGGVNMSVGLSHDWTNGPEYLALVASTMKRLAALGVPGLDSPYIVLGTPASLFGRQKEALAQRTQAVVAAEMKVLPQPMGAYCNFFMDARGVPIKDRQKRPDGKNRSWAVVEVGHYTTDFLLMREGNYIERAAVSCEGVHFAAENLVRILAAKDIQATPLTAEEALRTGVIVDFGERRIEAQVAEAVDHVVQKIMTMADSVLSNDVRSLDGVLLAGGGAPILAAGLQKKWPHTVLLENPRMAVADGFCRYGVGQMLRRAMAAEKATA

SEQ ID NO: 159 - protein, 305 aa, Campylobacter upsaliensis RM3195
MANEIQKIAIDIGYGDTKVAVGKEVFKFASAISKQKEAQSEYFEGKNEGVYDFLGKKYFVGDNALFEAVSTRGFDFLVKYSPLLVYHAIKKANFDLSKDIHIFTGLSIVNWGEKERFLESLKSIKVDNDILSPKITLMAQGQGVFCDYEKEKEGLVCVVDIGYNTFDFLVFDNGNPRQDLSFATKKGANVIITELQNIIKKRYSLDISEQSSKDIFQNGFIEIYGEKIDLSDSIDDLKEEYSEFIINELRNQREDIVKTAKRVIFSGGGAYFLDNVKSLKNVKNVDFSDKPYEYANVKGYLKWKK

SEQ ID NO: 160 - protein, 305 aa, Burkholderia vietnamiensis G4; identical to SEQ ID NO: 88

SEQ ID NO: 161 - protein, 341 aa, Bacillus thuringiensis serovar israelensis ATCC 36; identical to SEQ ID NO: 49

SEQ ID NO: 162 - protein, 388 aa, Bacillus thuringiensis serovar israelensis ATCC 36; identical to SEQ ID NO: 2

SEQ ID NO: 163 - protein, 230 aa, Bacillus thuringiensis serovar israelensis ATCC 36
MAYTGVLLSKTRRQPRPNKIFMQKAKVMVLDIGAGTTDLIVIDQGKAIERSKYTIDLGGNNITQTLRTTVQTNLEIRLSAQVFEQGVITGKVKQGLKEHDVTDELIGAKRSVAAKISKEVKDYLESSGIEANSIEYILVVGGGSIPSENDKVKPISDYLLDSIKRFAPQVGLVDISDIITKPNSVAFENVADADFVSSRELNISGAGTVTDLLEIKQYLAQQEQAKQVQA

SEQ ID NO: 164 - protein, 342 aa, Thermoanaerobacter pseudethanolicus ATCC 33223; identical to SEQ ID NO: 60

SEQ ID NO: 165 - protein, 345 aa, Thermoanaerobacter pseudethanolicus ATCC 33223; identical to SEQ ID NO: 58

SEQ ID NO: 166 - protein, 346 aa, Marinobacter aquaeolei VT8; identical to SEQ ID NO: 115

SEQ ID NO: 167 - protein, 316 aa, Caldicellulosiruptor saccharolyticus DSM 8903; identical to SEQ ID NO: 110

SEQ ID NO: 168 - protein, 236 aa, Caldicellulosiruptor saccharolyticus DSM 8903; identical to SEQ ID NO: 111

SEQ ID NO: 169 - protein, 324 aa, Shewanella sp. W3-18-1; identical to SEQ ID NO: 28

SEQ ID NO: 170 - protein, 297 aa, Clostridium beijerinckii NCIMB 8052; identical to SEQ ID NO: 124

SEQ ID NO: 171 - protein, 348 aa, Polaromonas naphthalenivorans CJ2
MKPSILAIDIGFGNTKATWSHRTLAGKAEAWSEIIFKSVCPLALDDDIAPGQATSNLDRVAVSVAGQAYYVGPKADREGGLRALHPDYINTPTHEALLLGAWHYMFKETGIVSPSVDMLVLGLPVSGFSANKKVLKEIGSRVRRVPVPMPMRSRLGKAYVDVSAKQVVVLPQPLGGLRLAAQSALELADDGVISMVIDPGYLTFDWLLSDGMAPHYELCGSFQGGVSQLINAVAKRLSQDHGIESADFAMIESALAKGELLLDLKRIDMTPYRKLAGQQAQDMVAQWLMRFNPYKAGVSRIFVCGGGAGFYIDALKARLPHIRMDVMPEGVMSNCRGYFLTGQDMFAD

SEQ ID NO: 172 - protein, 364 aa, Congregibacter litoralis KT71
MTERIDKKPTQADKTSQLTSDPMSVVQVGLDDGYAYTKVALADGRLFSAPSRARIGSAGVTWIREQEQRIFEYETGGTVYSVGAVDGEATQFDEYPSSALNRVIVQHAFQQAGLSGRSIHLVTGLPVSAYYRHDGQLRQQEIDRKCESLKLSVEPKPNSAKPGKSILSASVAFHEVIPEALAAWYDHVIVTQADGVTLDGDRLSAPIAIVDIGGRTTDFVVVQDQGIVHGSSGSLNRGMLNVKSRVADLIQQTFDMSELGEQSIARAVDSSRLRLHGKDHDISAMVAAAKRELVELLYAETRRKLGLGVELDQVLFVGGGSAALATDIANWFPNQTIPDHAAFANARGMLKYLQYVCDDTAGGF

SEQ ID NO: 173 - protein, 333 aa, Congregibacter litoralis KT71; identical to SEQ ID NO: 112

SEQ ID NO: 174 - protein, 316 aa, Desulfotomaculum reducens MI-1; identical to SEQ ID NO: 126

SEQ ID NO: 175 - protein, 384 aa, Halorhodospira halophila SL1; identical to SEQ ID NO: 56

SEQ ID NO: 176 - protein, 395 aa, Bacillus sp. NRRL B-14911]; identical to SEQ ID NO: 136

SEQ ID NO: 177 - protein, 327 aa, Photobacterium damselae subsp. piscicida; identical to SEQ ID NO: 27

SEQ ID NO: 178 - protein, 344 aa, Bacillus weihenstephanensis KBAB4; identical to SEQ ID NO: 90

SEQ ID NO: 179 - protein, 341 aa, Bacillus weihenstephanensis KBAB4; identical to SEQ ID NO: 44

SEQ ID NO: 180 - protein, 318 aa, Nostoc sp. PCC 7120; identical to SEQ ID NO: 67

SEQ ID NO: 181 - protein, 310 aa, Nostoc sp. PCC 7120
MINIYCADIGNYSSITALKGEKPRVMRSVIQDVTYTSARDYDSDNSPSVKLDDKVLVLGDRATKQKNSQTAAERGKDLPEFFKPFTLAGLRQDFDGIVRFLVPEHSQWHEDTIRRTLVADHQITVNGTNYRHRIKNVEFFLETDVAVVNAYRNGKLDMDGDTLAIDIGGGTTNYVVITPSLDVLTRRSIPKVGGVSLANDIINSDLMQSFAKRDNVAFKVAKMMDAIADASFIYGRKYDFSSVFPGLLENWFNNLMDSISTAANDYLADITNVMLIGGCANLVRQKLSSKQGFYIPANPQLSNIQALLAM

SEQ ID NO: 182 - protein, 350 aa, Nostoc sp. PCC 7120
MTDLAEMPENALPRHQGTLTLIAGYDLGNSGVKFVTSDRKIRFPSYLENCYYRPTELPTEGYVEYLEGDAITKLDYKQWLSGYAAYDANPKNHLRVTDDATAKVTQSLKHLLAALSNYPYKPVINLIICASLHERGDLEEQLIDAIAGKHIVKFGGKPIPTTVNIHVLKVYDEGHAAIAANAHTLDTSKQNVIVDIGNRTVIATLIGQKGHLANRKTFDNGVEELIRMISVNPTFKNRLYGEIAIPHLIRQGLESSEKPFWYGKQFSFEDVYRQELMPWVQKSLAPVFKFIHPWKINADACLIIGGGSQLPSVDEALKAKGFVIAENPLWANAEGLYQLATMMYSRGIDE

SEQ ID NO: 183 - protein, 390 aa, Oceanobacillus iheyensis HTE831
MTKSRIAAVDVGNDALKGNYGKLENELYIPNVIAPDLEERPVIGIEELDDKEILENIHIRIHSPALSENNLIYRVGSLATKTTNSQELDQGSSKSEEDQTLIMLLTSLALDAVSASDFEEKNGVIDANYTLGTGLPLREVKEGKDVAYRSHLLSSVHQIEFLVTPKYQGKKVNIKFDEVKVYPEGFAAYVNLIMDNDLKVINKDIIDKQILIQDIGGLSTDIAVIRNRNVDDDKAQGFNLGVSESLEQIREEIRTKHGVELDSRRDVVDIITRKNDRNHIMVKGSRTNVHDITDHILLELAKKEYRYLRNVWAKNSQSEICYFVGGGSAVLKDYIKALNNKLDGYNIEFFEDENESIWMMANAYYKLITDFVQKSSPQVVEKEKKTTKSK

SEQ ID NO: 184 - protein, 359 aa, Proteus vulgaris; identical to SEQ ID NO: 24

SEQ ID NO: 185 - protein, 364 aa, Pseudomonas resinovorans; identical to SEQ ID NO: 25

SEQ ID NO: 186 - protein, 324 aa, Vibrio cholerae; identical to SEQ ID NO: 29

SEQ ID NO: 187 - protein, 351 aa, Symbiobacterium thermophilum IAM 14863; identical to SEQ ID NO: 55

SEQ ID NO: 188 - protein, 333 aa, Azoarcus sp. EbN1
MQRTIIGLDIGHSSVKVVASSSSGRHQFLFPSVAIPAFAISDEGEARIAATETVAVGQRKFFVGETALVQSCGQPPALGLTNDWIETPEHSALIAGAAKKLERLGLDLRNCLVVTGLPSALHTHQKARMREVVRQQIQAEVLVAPQPFGPLQTLMLTPAGTLSSAHDMCEENWAVVEIGHFTTDFLLIQSGRIVEKASGSCGGVRLAVEHMQRLLNQENIQVDHFEAEQALRERRIKYFGKALDVTEYAKQAISLIASEVMDTASRVLDPVARKLDGILIAGGGAPVIFPELSLKWPHATIANEPRMAIAEGFCRFGMSISAKTQGAKEPAAA

SEQ ID NO: 189 - protein, 305 aa, Clostridium perfringens D str. JGS1721; identical to SEQ ID NO: 93

SEQ ID NO: 190 - protein, 369 aa, Desulfitobacterium hafniense Y51
MFENDILVAGGDPGFGAIKLDAGDTKVLFPAVICKGNERIFSALGNGNVSRGTDEEMQTGSLDVIVTNHSTGVSRHYFMGSLAESLNPNEAHYCWDEDKSTDEEATALLVVALAVAQKEPKANIYLGTGVPVKYYAALKDKYEAELKGTWSVAFRSGPFKGQTRQLTIIRSRVLPQSYGVFIKETLNEYGIPISPKLFNGYVVVIDPGFRTTDVATFYDGVMLDPPNSFSIEKGLKWAYTGVAEQLKEMTINHANPIETDDKELDKVFRVNEGMYPWNNGAINLNPVMQDMLGQLGTDISREVKKSLKPMLGKIHTVLVAGKVGEMIFEHLQFENKVLIENPQFGNATGFRIMAANLVNNITKKANAAP

SEQ ID NO: 191 - protein, 290 aa, Clostridium acetobutylicum ATCC 824
MITVVDLGNFNIKYKSGSNQGNFSSKITDYQPYPEGFERIQMQGESKITYLGVGELNKEFNKVARNYLPQLLYAICRANNYDNIETNLVTLLPIVQMKNKEKMIENLKEKEFNFQFNGEKRKVLINDTIVLPEGYATYFSLSEEDKESSLCIIDLGSRTINICVLQDGAIQLLHTIKLGSFDFYTKVKTRENSKGEDYTEEDIPRLVENGTIEISDIEYEDFLTEVLNEVKAYVNLKTYKVIWTGGTALMLKEQIEKLPLNNSKLHNDPLNSNTNGAAGAAEIIWQSEEE

SEQ ID NO: 192 - protein, 409 aa, Clostridium acetobutylicum ATCC 824; identical to SEQ ID NO: 5

SEQ ID NO: 193 - protein, 334 aa, Thermoanaerobacter tengcongensis MB4; identical to SEQ ID NO: 61

SEQ ID NO: 194 - protein, 341 aa, Bacillus cereus ATCC 14579; identical to SEQ ID NO: 43

SEQ ID NO: 195 - protein, 341 aa, Bacillus anthracis str. Ames; identical to SEQ ID NO: 41

SEQ ID NO: 196 - protein, 341 aa, Bacillus cereus ATCC 10987; identical to SEQ ID NO: 37

SEQ ID NO: 197 - protein, 348 aa, [Moorella thermoacetica ATCC 39073; identical to SEQ ID NO: 125

SEQ ID NO: 198 - protein, 341 aa, Bacillus cereus E33L; identical to SEQ ID NO: 38

SEQ ID NO: 199 - protein, 383 aa, Anabaena variabilis ATCC 29413; identical to SEQ ID NO: 68

SEQ ID NO: 200 - protein, 349 aa, Lactobacillus paracasei subsp. paracase; identical to SEQ ID NO: 103

SEQ ID NO: 201 - protein, 347 aa, Dechloromonas aromatica RCB; identical to SEQ ID NO: 80

SEQ ID NO: 202 - protein, 354 aa, Dechloromonas aromatica RCB; identical to SEQ ID NO: 89

SEQ ID NO: 203 - protein, 363 aa, Nitrosococcus oceani ATCC 19707; identical to SEQ ID NO: 113

SEQ ID NO: 204 - protein, 341 aa, Salinibacter ruber DSM 13855
MFKTKTLPSVFEASNAELVDVSDSLLTGLKIGHNGRSYVVGELALLEGNAPHKGINNAPSDLDYRLLLQAALAVTKAGAEEPMYVTTGFPSSTYAAHRDTAEELVKGTHVIDLDGRTFGKSPDTSIRVEVDQVEIIPEIEGFTFGVRQGEPRERDPFFAVGLGYGTMEAALSLPSGIVQRTTASASGLQYATQLMSDRLQKEHYLDMVTEHQLDMAMRKGSIVIGRKKMDLTEMRQDVLSTYYEDIVSPTLKRAFDDADFGRARKMYVGGGGALFDELVDAFTDEFGDVLSLEVVPNPASFISQGYALHAADANGGHRARAVGLDIGNANTVINLLREESV

SEQ ID NO: 205 - protein, 322 aa, Syntrophus aciditrophicus SB; identical to SEQ ID NO: 120

SEQ ID NO: 206 - protein, 423 aa, Bacillus thuringiensis
MVEQMLSKNMLLGGFDTGNIKAKISFLNEKGNIESFAIPTVIAEAPPAKIDLKSAPSKKNDYVNEKDEDIELLHVRIISNSLDGDARSRAWYVGAYAKDQEDRQEPTVDEMGKTEDKFSQKNKKLHLIPLFTSMAVAAARIGKEEVSVPFSGGMPIEDYKLRGEEQILEMLYGEHTVEFLDGTYEGKKIKITINDGTMNVEGVSSVLAILFDIVNGEIVEVEGMDAEIGESYAINDLGAGTSDNAFFEDGELNKKLSTNTDLGTNKYIDEILKNIKERFMENEILKSFMTDEIESPFKTREDFIQRLVMPEVEKMIEDDTYKPTFSVKWGPVKENVTDIVMDGMLKYAEDQKASLMKFWFKTNADKNIVVGGGVLFGYAGLRDLKEQDGFILPKNIQESAYFTSRSYLIANLLEQLNKEGVEA

SEQ ID NO: 207 - protein, 341 aa, Bacillus thuringiensis serovar konkukian str. 97-7; identical to SEQ ID NO: 39

SEQ ID NO: 208 - protein, 369 aa, Rhodoferax ferrireducens T118; identical to SEQ ID NO: 78

SEQ ID NO: 209 - protein, 409 aa, Lactobacillus salivarius UCC118; identical to SEQ ID NO: 147

SEQ ID NO: 210 - protein, 355 aa, Polaromonas sp. JS666; identical to SEQ ID NO: 91

SEQ ID NO: 211 - protein, 394 aa, Polaromonas sp. JS666; identical to SEQ ID NO: 76

SEQ ID NO: 212 - protein, 324 aa, Vibrio cholerae B33; identical to SEQ ID NO: 30

SEQ ID NO: 213 - protein, 332 aa, Ralstonia eutropha H16; identical to SEQ ID NO: 83

SEQ ID NO: 214 - protein, 308 aa, Clostridium perfringens; identical to SEQ ID NO: 109

SEQ ID NO: 215 - protein, 369 aa, Desulfitobacterium hafniense DCB-2; identical to SEQ ID NO: 105

SEQ ID NO: 216 - protein, 343 aa, Acidovorax sp. JS42; identical to SEQ ID NO: 75

SEQ ID NO: 217 - protein, 281 aa, Clostridium phage phiSM101
MILAVDLGNYNIKTSENILFESRYEEVEKEDFDTDLLEFDNKSFRMESGDFENEFNKAKKQYIPNLLYAIAKSCDKNKVEIDLVLGVPASNLGISENFKTELSDREFKFTLFGTKKVVKINKVATVAEGLSSFYTLPKEERLKDIVLLDIGGRTINVCTFTGGKCSLKFTVPGGMLDLYSQIQEDYNKVGNNADVEEIIRLIKNDTIDASNAKERFVKSQLNKIRLQVPNFSTYKVYLVGGGSLELQEALRNQLENINFVPDTVFSNAKGNKLIAKAKWGE

SEQ ID NO: 218 - protein, 349 aa, Verminephrobacter eiseniae EF01-2
MPDVIAIDVGYGNTKPVWSHDPDKSGKERWGEACFPSITPMAMVDEESTGGAYNPDRILITVRNKGYYAGPAASMGIEARTLDPDYIESDDHEVLLRAAIHWAMREKRALLPAIDMLVVGLPVSGFSARGKRLRDIALAPRDVPVPRVLQTSGVPAVITVRAKQVKVLPQPFGSLRYAAQNLPDTDELFSDRALSMVIDPGYRTFDWFVANGMRPEMKLSGSFDGGVSNILRQVSQKIGYEHGTGSLEFDQVEEGLLRGAINLGYKVIDTRPYQAVVLDAARKEVMAFLGRIDANKARLRRVFLTGGGASYYKLALAEKLPGYQIQMLDNGLMGNARGFWLSGYDDFDV

SEQ ID NO: 219 - protein, 348 aa, Clostridium novyi NT; identical to SEQ ID NO: 122

SEQ ID NO: 220 - protein, 341 aa, Bacillus thuringiensis str. Al Hakam
MKSLYAIDVGIGFTKRAYRQDEDSEVTVKSEASTLAPVPNHDESEDLTKVSFIDLDFAYYMGNEAHQSDASFLPPFEEEIENYYESEQFKQQIFGCIAKDYKENVVLPLVVTGLPVTYFGSQHEQLQRALKKETSVQIDGKFIHITVENALILQQPVALHAYFLKEGIIQERDRILIIDGGFRTLEMTDMKQNVILNHYETELGCSKPLKNIKNILQNHAGESNQLHINDMPNILEKGYGGREENPQASQVHTLIQKELDTHFQDVMCVLQEQFKLDQYDTIIWTGGIVDLHKKRIEKMQGEISSFRMVDASKEAALHGYYMIGSQVFDDITNQSVYESKL

SEQ ID NO: 221 - protein, 389 aa, Bacillus thuringiensis str. Al Hakam
MSILLKAGADAGNNGLKLMVKGQDPIFIPSIYALYIGEPTGLLDEEDVSLSELENHIDVTISSPSLMLNNVRYIVGEKVIQDQLKGTEVEKKSNKSTDELMVITILSGLAVSAMRQSPTSSHINIRYDLSVALPMQLITQEIAAENAKRYMGNHKVVFHYPNGRDVTINISIEYCKCLPEGASGTWGIVYDEEGNVVKHKIECEQNKVSEIDFVDKTLLSFDIGAGTTEEVVSLGVNFRPQLSKGLSYGVKETLLQIITRWNRKYPTKTIDSITEFNQIYLNDKHPRNALLVEESQPALLGLAARVATDIINKIDDMKDDPYVFIYGGGAVIIKNSLKMILKQKGRLTNVIFVDNPLFTNARGLLVYTCSPKYREHKQKELGFTNLTIS

SEQ ID NO: 222 - protein, 334 aa, Burkholderia ambifaria MC40-6]; identical to SEQ ID NO: 87

SEQ ID NO: 223 - protein, 334 aa, Burkholderia multivorans ATCC 17616; identical to SEQ ID NO: 87

SEQ ID NO: 224 - protein, 371 aa, Lyngbya sp. PCC 8106; identical to SEQ ID NO: 66

SEQ ID NO: 225 - protein, 381 aa, Nodularia spumigena CCY9414; identical to SEQ ID NO: 69

SEQ ID NO: 226 - protein, 332 aa, Ralstonia pickettii 12J; identical to SEQ ID NO: 84

SEQ ID NO: 227 - protein, 324 aa, Vibrio cholerae MZO-3; identical to SEQ ID NO: 32

SEQ ID NO: 228 - protein, 418 aa, Lactococcus lactis subsp. cremoris MG1363; identical to SEQ ID NO: 104

SEQ ID NO: 229 - protein, 350 aa, Leptospirillum rubarum; identical to SEQ ID NO: 117

SEQ ID NO: 230 - protein, 328 aa, Acinetobacter baumannii ATCC 17978; identical to SEQ ID NO: 101

SEQ ID NO: 231 - protein, 384 aa, Cyanothece sp. CCY0110
MSDLTMALDFGSSLGRAIYTTSSSYVKPELLLLDPHVVEVPNISIANYEKYKVGNPSPQDSSWVNLNDTYFAVGFLAKRQFSTIHCLNSLKIDSAIPLTLAMVGAVAEIKGLGTTFSLDLGVLLPWSEFKDKDKLKSVLDSALQSFEYRGQQYHVTLQAFDALPEGGGLFARGRVASKGKPMKRVTETNLVVLMIGYRNASILVVERGELTIGLTSEFGFSQMITKIKTFTSGQSEDVLIPAICTGKSISDRTLERLARSQRAELREAEKKEIKDAIEDSQQEYVATLTNWISQQIPPHLEIDEILLGGGTAKYFKRNLTTLLKSYGAQINWSQSLEKRVVQTFGNEVSKNYLASRLADVYGLFYRLLKKPLPRLKEVVTRESA

SEQ ID NO: 232 - protein, 346 aa, Marinobacter sp. ELB17; identical to SEQ ID NO: 116

SEQ ID NO: 233 - protein, 327 aa, Yersinia ruckeri
MSQFVLGLDIGYSNLKMAMGHKGEEARTVVMPVGAGPLELMPQQLTGGAGASIQVVIDGEKWVAGVEPDRLQGWERELHGDYPSTNPYKALFYAALLMSEQKEIDVLVTGLPVSQYMEVERREALKARLEGEHQITPKRSVAVKSVVVVPQPAGAYMDVVSSTKDEDLLEIIQGGKTVVIDPGFFSVDWVALEEGEVRYHSSGTSLKAMSVLLQETDRLIQEDHGGAPGIEKIEKAIRAGKAEIFLYGEKVSIKDYFKKASTKVAQNALIPMRKSMREDGMDADVVLLAGGGAEAYQDAAKELFPKSRIVLPNESVASNARGFWFCG

SEQ ID NO: 234 - protein, 383 aa, Geobacillus thermodenitrificans NG80-2; identical to SEQ ID NO: 137

SEQ ID NO: 235 - protein, 315 aa, Aeromonas salmonicida subsp. salmonicida A449; identical to SEQ ID NO: 33

SEQ ID NO: 236 - protein, 303 aa, Clostridium kluyveri DSM 555; identical to SEQ ID NO: 96

SEQ ID NO: 237 - protein, 401 aa, Bacillus sp. SG-1
MRRDYMERSNFLAVDIGNSWYKVLASTDGVVSEYQMPNAIALFDDEFYEMPYEEEDVEIEENLIVEVKSPSVMNKREIFYAGKSAARQRNVSLTSVNNQKVDEVRTYILLFSAAAYHALLTSENEMDIVYEIDQLAVSLPTTQYKEKKEQLKQRLIGSHTVILHKVPGVPEPKEVCVKIKINDVIVGAEGACAYLGLTRDQETLGIKDDGLVKDSAKGILIGDLGGDSVDFVGIKNSKPVASVEGEHFGINQFLDIIIQKVSKNELYKFDSRSELEEKLYAGQSEWYVEPFAGVRKDISKYVIPQLKSMAIKYLELFDRVRSSSNEIKGASRYIAVGGAAKLAQKQIQEAAVRWSEKGRPINLYFPEDLEKLNVLGLMILAKMNHLKKQQEETTDLAATRG

SEQ ID NO: 238 - protein, 332 aa, Ralstonia pickettii 12D; identical to SEQ ID NO: 85

SEQ ID NO: 239 - protein, 350 aa, Ralstonia pickettii 12D; identical to SEQ ID NO: 77

SEQ ID NO: 240 - protein, 298 aa, Bacillus cereus subsp. cytotoxis NVH 391-98; identical to SEQ ID NO: 52

SEQ ID NO: 241 - protein, 326 aa, Beggiatoa sp. PS
MFNLKSQRKVQLAIDIGNRLLKSCTSNGAIKTLPSWYKDLEEWDMPHSDKNSVVIHYLQGVNTNLVKKSWAVGNVAQDLGGNPTFESEKAFLAPKLALAMIDAGGGTQQITVERLVCALPNELQEEKVDAIVKGLTGTHQIKRNGEELKIEIEKVEVQPETLGAFKWVLANKSFKYARINGILDLGGKTGIGQLYTKNGTLIRESRIIVGGTYQLAQFVAQHPKLIRLDTTPQLSLIMDAIADGSLSYGTMDINFADKFPIYVSQWLDDIRNKLKLSWSKWLSELGEVVIVGGSAVLAKPIVDQTAGRFKIVKENSQFCSVLGMLQ

SEQ ID NO: 242 - protein, 316 aa, Yersinia pseudotuberculosis IP 31758; identical to SEQ ID NO: 100

SEQ ID NO: 243 - protein, 330 aa, Bacillus phage 0305phi8-36; identical to SEQ ID NO: 23

SEQ ID NO: 244 - protein, 348 aa, Desulfatibacillum alkenivorans AK-01; identical to SEQ ID NO: 57

SEQ ID NO: 245 - protein, 407 aa, Bacillus thuringiensis; identical to SEQ ID NO: 4

SEQ ID NO: 246 - protein, 341 aa, Bacillus cereus H3081.97; identical to SEQ ID NO: 35

SEQ ID NO: 247 - protein, 341 aa, Bacillus cereus AH820; identical to SEQ ID NO: 47

SEQ ID NO: 248 - protein, 369 aa, Heliobacterium modesticaldum Ice1; identical to SEQ ID NO: 127

SEQ ID NO: 249 - protein, 341 aa, Bacillus cereus AH1134; identical to SEQ ID NO: 42

SEQ ID NO: 250 - protein, 341 aa, Bacillus cereus W; identical to SEQ ID NO: 46

SEQ ID NO: 251 - protein, 341 aa, Bacillus cereus B4264; identical to SEQ ID NO: 45

SEQ ID NO: 252 - protein, 341 aa, Bacillus cereus G9842; identical to SEQ ID NO: 48

SEQ ID NO: 253 - protein, 393 aa, Bacillus cereus G9842
MKTQLVSRKTKKNQPVLVGLDVGFGATKYISNVHPYLTALPSAVVPGKYKTSNKIVGSKEVDLENLVVVTEEGTFTVGQLALKVPNTTTKRTVVRDRANDVFSKVLFQTGLGMAVPHESGEYDVFLVTGLPNKDFELSIKDNLEEFLNKPFTITFPVNGGNEIKKTINVIGLEIMRQPEGAVTYNQFTFSQEEFLVPSENAKNFIGIIDCGHFTTDYALFRDGVIMEDSITSNSTVAVNDVYKRLRKVLTIKFDKLGYTEYQAEEEDLDNAVLTGKVEYVEAHDVSEEVGDCVKTVAKIIAKDILDAWGNETNRVQTILLSGGGSALFSEALKQEFTERKKRGFEVLDVAQFSNVLGYYMYGCIALTDEKEQSEVFMEFVEPVFGEEEVAETE

SEQ ID NO: 254 - protein, 341 aa, Bacillus cereus NVH0597-99; identical to SEQ ID NO: 40

SEQ ID NO: 255 - protein, 389 aa, Bacillus cereus NVH0597-99; identical to SEQ ID NO: 145

SEQ ID NO: 256 - protein, 389 aa, Bacillus cereus H3081.97
MSILLKAGADAGNNGLKLMVKGQDPIFIPSIYALYIGEPTGLLDEGDVSLSELENHIDVTISSPSLMLNNVRYIVGEKVIQDQLKGTEVEKKSNKSTDELMVITILSGLAVSAMRQSPTSSHINIRYDLSVALPMQLITQEIAAENAKRYMGNHKVVFHYPNGRDVTINISIEYCKCLPEGASGTWGIVYDEEGNVVKHKIECEQNKVSEIDFVDKTLLSFDIGAGTTEEVVSLGVNFRPQRSKGLSYGVKETLLQIITRWNRKYPTKTIDSITEFNQIYLNDKHPRNALLVEESQPALLGLAARVATDIINKIDDMKDDPYVFIYGGGAVIIKNSLKMILKQKGRLTNVIFVDNPLFTNARGLLVYTCSPKYREHKQKELGFTNLTIS

SEQ ID NO: 257 - protein, 343 aa, Bacillus cereus 03BB108; identical to SEQ ID NO: 51

SEQ ID NO: 258 - protein, 289 aa, Clostridium botulinum Bf]
MKITVVDLGNINVKYVGENKGRFSSKITNDYQSYEEGFQRVEYNGIKTYIGVGELSREFNKADRDYMAQLLYSLAKANTADTKEINLTLLLPIIQMKNKTRLIETLKGENFKFKFNGIDREIKINDLMVLPEGYASYYSLDIENKKGDVCILDLGSRTINICVLENAKIVKTNTIKLGSFDFYSKIKSLENAKGEDYIEEDIQRLIDNGLIKVDSKQYIEFLSDILNAVKPYVNLKTYNTIFTGGTSLMLKEYIEKLPLNKFKVHPNALTSNVDGAMEASKKVWNNGNK

SEQ ID NO: 259 - protein, 355 aa, Clostridium botulinum Bf]
MKNIIAGVDTGFGYGIGMTNDTEVIMKNYINNITEKEALNIANTIKELNNKNTLIKYNGKYFICGDACIERYPDTMQRLNRDRIKDEYHLIELLSIVGQLTKESEFNLYLCVGLPNRSKGDSKKFEDWLKGSAFEFSYLCNFGEVKKKVYIKDVTCLPQAYSPIFTLPRNDMNKTIFSVDIGHSTLDLMLVKNMQTVMASDTLLDGEGCIRIYNNLKQALIRQNEDKKITYYSYSQLQEILENGNYSLYGEEQQIENILNRCLEEYAEYVFFTIENNMYKYMPTVDTFIFSGGLLNNNTFKTILSDKFKQAYKIPLLVQNNRSQYTIAEGLKEYSNIKYADKLEVVKENDIKAAK

SEQ ID NO: 260 - protein, 348 aa, Clostridium botulinum C str. Eklund; identical to SEQ ID NO: 123

SEQ ID NO: 261 - protein, 293 aa, Clostridium butyricum 5521; identical to SEQ ID NO: 102

SEQ ID NO: 262 - protein, 308 aa, Clostridium perfringens C str. JGS1495; identical to SEQ ID NO: 108

SEQ ID NO: 263 - protein, 302 aa, Clostridium perfringens C str. JGS1495; identical to SEQ ID NO: 97

SEQ ID NO: 264 - protein, 308 aa, Clostridium perfringens E str. JGS1987; identical to SEQ ID NO: 107

SEQ ID NO: 265 - protein, 305 aa, Clostridium perfringens E str. JGS1987; identical to SEQ ID NO: 94

SEQ ID NO: 266 - protein, 381 aa, Clostridium perfringens E str. JGS1987; identical to SEQ ID NO: 135

SEQ ID NO: 267 - protein, 303 aa, Clostridium perfringens E str. JGS1987; identical to SEQ ID NO: 130

SEQ ID NO: 268 - protein, 302 aa, Clostridium perfringens E str. JGS1987
MKILGLDNGYNYTKTSMGQCILSTVEKGHDDYNNVLEMHLNGKNYIIGEPTGQYIVDANKFKTEEGKELVKLTTLAAIGLSYPEESVIDVSIVAGLPVAFYADQKEELTKLIKGLDDSCIELNKIGKKQIIKINKVMILPQACGIIIEKNKKKESSLVIDIGGGTWDIAQFDGLKLVEKATYEKGMLVLYSAIAQELNSKYYTKFETSDIQNIIDRKFFTVEGNKKGIEDIEEYINNYVRKIAATIKRDFDTTNIDNFYLIGGGAIALESYVKKYFPSIEVEKDCQFTNVNSFAFMGELKLK

SEQ ID NO: 269 - protein, 292 aa, Clostridium perfringens E str. JGS1987
MKIAIDLGNRNTKLACKTGDKIKRDIFQARFTNEEQQDYTAAEVVEIDGIKYCIEQGNYDFEFNKTEKNYLPLLLAAISRATSDNEVEIMMGAPAEHVSGLRDKFKEQLLDKEFIFKYKDEDRKIKINKLGVIGEGFATYFSIPEEIRNSNTNLGIIDIGGRTINVVTFINGKQHIVCTLNFGILDLKNNLLKELKKAGKDYDLNVVENLLLNNRIKIEEKEKEQLINRLINELKIYKIDIDLYTWVISGGGAEDLGNEILEKYFGENSLMKDPLFTNVLGAYNFMLAKWGV

SEQ ID NO: 270 - protein, 305 aa, Clostridium perfringens B str. ATCC 3626; identical to SEQ ID NO: 95

SEQ ID NO: 271 - protein, 301 aa, Clostridium perfringens CPE str. F4969
MKVSTLGIDLGNANVKTSKSVIFESKIKPGITKMNENDIKVIYNGAEYTVGAYDGALNISKRKYFKTAYKINLLTAIAKSSKANNITTNIVVGVPVESFNDKNLTEEIKKHIESFENEKITVNGVEKTINIENVEVFCESAIVFADREKFKDKKTLVIDFGGGTIDISFWDGLNLTKARTYREGMITLYENVIKQVNNRYSTTLNSNIAIDMIGEDKFTIDQEEKNISFINAIVETYVDGLTSYINQYFDVESADSIQLIGCGAIQLEKNIKDEYEKAELHPNAAFANANTYEKVGEILWI

SEQ ID NO: 272 - protein, 302 aa, Clostridium perfringens CPE str. F4969
MKILGLDNGYNYTKTNMGQCILSTVERGHDDYNNVLEMNFNGENYIIGEPTGQYIVDANKFKTEEGKELVKLTTLAAIGLSYPEESVIDVSIVAGLPVAFYADQKEELTKLIKGLDDSCIELNKIGKKQIIKINKVMVLPQACGIIIEKNKKKESSLVIDIGGGTWDIAQFDGLKLVEKATYEKGMLVLYSAIAQELNSKYYTKFEASDIQNIIDRKFFTVEGNKKGIEDIEEYINSYVRKIAATIKRDFDTTNIDNFYLIGGGAIALESYVKKYFPSIEVEKNCQFTNVNSFAFMGELKLK

SEQ ID NO: 273 - protein, 376 aa, Natranaerobius thermophilus JW/NM-WN-LF; identical to SEQ ID NO: 54

SEQ ID NO: 274 - protein, 355 aa, Clostridium botulinum B1 str. Okra
MKNIIAGVDTGFGYGIGMTNDTEVKMKNYINNITEKEALNIADTIKELNDENTLIKYNGKYFICGDACIERYPDTMQRLNRDRIKDEYHLIELLSIVGQLTKESEFNLYLCVGLPNRSKGDSKKFEDWLKGSAFEFSYLCNFGEVKKKVYIKDVTCLPQAYSPIFTLPRNDMNKTIFSVDIGHSTLDLMLVKNMQTVMASDTLLDGEGCIRIYNNLKQALIRQNEDKKITYYSYSQLQEILENGNYSLYGEEQQIENILNRCLEEYAEYVFFTIENNMYKYMPTVDTFIFSGGLLNNNTFKTILSDKFKQAYKIPLLVQNNRSQYTIAEGLKEYSNIKYADKLEVVKENDIKVAK

SEQ ID NO: 275 - protein, 383 aa, Geobacillus stearothermophilus; identical to SEQ ID NO: 134

SEQ ID NO: 276 - protein, 355 aa, Clostridium botulinum A3 str. Loch Maree
MKNIIAGVDTGFGYGIGMTNDTEVKMKNYINNITEKEALNIADTIKELNDENTLIKYNGKYFICGDACIERYPDTMQRLNRDRIKDEYHLIELLSIVGQLTKESEFNLYLCVGLPNRSKGDSKKFEDWLKGSSFEFSYLCNFGEVKKKVYIKDVTCLPQAYSPIFTLPRNDMNKTIFSVDIGHSTLDLMLVKNMQTVMASDTLLDGEGCIRIYNNLKQALIRQNEDKKITYYSYSQLQEILENGNYSLYGEEQQIENILNRCLEEYAEYVFFTIENNMYKYMPTVDTFIFSGGLLNNTTFKTILSDKFKQAYKIPLLVQNNRSQYTIAEGLKEYSNIKYADKLEVVKENDIKAAK

SEQ ID NO: 277 - protein, 333 aa, Clostridium botulinum A3 str. Loch Maree; identical to SEQ ID NO: 82

SEQ ID NO: 278 - protein, 333 aa, Cupriavidus taiwanensis; identical to SEQ ID NO: 82

SEQ ID NO: 279 - protein, 334 aa, Burkholderia ambifaria MEX-5
MKTAVFAIDVGYGNTKYAHRAANNAVASGMFPSLAPLAASRSIAGYGDSVLTARKVATIVIDQVEYEVGPDVSLTAAYGNTGRALADDYIRTNNYAALLLGAIHFSGVTHIERLVLGLPVHNLKKYAGALMERFTGTLDFGAGRVKIDKVMVIPQPLGSLVLASSNRKGGFGRDVEHLVVDVGYFTTDWVYASGFAMDDKRSGGMPGGASQIYQRIAQLIARDQGDAVEDIERIDKALREQTPFFFYGNDIDLAPYLEKAQPLISGVVKEMQNNVGRLANVRSIILSGGGAALYASVIRQAFPRVVIEVIDAPCLANVRGFLLVGESSVARERR

SEQ ID NO: 280 - protein, 399 aa, Cyanothece sp. ATCC 51142
MVCIVKKRELKEKEKMADLTMALDFGSSLGRAIYTTSNSYIKPELLLLDPHVVEVPNIAIANYEKYKVGNPSPQDSSWVNLNDTYFAVGFLAKRQFSTIHCLNSLKIDSAIPLTLAMVGAVAEIKGLGTTFSLDLGVLLPWSEFKDKDKLKSVLVSALQSFEYRGQHYHVTLQAFDALPEGGGLFARGRVASKGKPMKRVTETNLVVLMIGYRNASILVVERGELTIGLTSDFGFSQMITKIKTFTSGQSEDVLIPAICTGKSISDRTLERLARSQRAELREAEKKEIKDAIEDSQQEYVATLTNWISQQIPPHLEIDEILLGGGTAKYFKRNLTTLLKSYGAQINWSQSLEKRVVQTFGNEVSKNYLASRLADVYGLFYRLLKKPLPRLKEVVTRESA

SEQ ID NO: 281 - protein, 379 aa, Clostridium perfringens D str. JGS1721; identical to SEQ ID NO: 138

SEQ ID NO: 282 - protein, 297 aa, Clostridium botulinum B str. Eklund 17B
MNIGIDLGNGYTKFKGKKFASKVKMGRLANFGEKNKEVHEVKYNNASYVVGEGQFFITDDRYFTNEYKICLLTAIALASNEIVIEANICVGLPVMKYMSDVKRRLEDHLNTIGAEKITVNGEEKIIHIKSVTVFVESALVVKDRSQGNEITIDIGAGTENIIQWENGVPVNFDTKNKSFYNLYNKISKYLKDVGKGDVSTEYIEKTLGQDEIIINQELVDIRDTHNIIEQHVRELASKIISEFDISRARRIRLMGGGGLPTYKYWKNIIEKVELADNAQFINSEIYETVLEMSGIND

SEQ ID NO: 283 - protein, 305 aa, Burkholderia multivorans ATCC 17616
MFPSLAPLAASRSIAGYGESVLTARKVATIVIDQVEYEVGPDVSLTAAYGNTGRALADDYVLSANYAGLLFGAIHFAGVDHIERLVLGLPVHNMKKYSAELKERFTGELNFGAGRVTIDKVMVIPQPLGSLVLASSNRQGGFGRDVEHLVVDVGYFTTDWVYANGFTMDDKRSGGMPGGASQIYQRIAALIARDQGDEVEDIERIDKALREQTPFFFYGSNIDLAPYLEMAQPLISGVVKEMQNNVGRLANVRSIILSGGGAALYAGVIRRAFPRVVIEVIDAPCLANVRGFLLVGESSLARERR

SEQ ID NO: 284 - protein, 352 aa, Acinetobacter baumannii ATCC 17978
MKGYKTLTVGVDDGHDGIKIYCGEVGKSFRLPSRVANGRTIIGDTDEVNKQIIHVNGKYFTVDEFTKEHIDTRTEDYPLSDANVALVHHALHQAFDGQYRKFKIATGLPLNRYYGGKDKAKNEKLIADKTQNLLINKDFNNPTVYNLYEHDKKNDPLQILNHIVLSEGQCAYFDALMDDNGKRSSMYEDLWEGGCAIIDIGGRTTDIAMINPRGGTMQASRCDTLDVGIITLKNKVSQNLKEFFGLSSNITDWRLSKALKTGIYNHGGKDHDISKILNAAKVEITDQIENSIKVNVQDGQDLGAVLLVGGGSITLGDELLKRFNYDNWHLVKQPEFANARGMYKCAKYISKL

SEQ ID NO: 285 - protein, 324 aa, Proteus mirabilis HI4320
MFVLGVDIGYSNLKLAIGQSGNEPKTIILPAGAGPADRMPERIGGGDDETCLYVSVDNERWAAGVPAGRLQGWERELHPEYPTTKTYKALFHAALLMAETESIDLVVTGLPVSQFHEPQRKSDLVQRLKGVHQVTPKRSITVHDVKVLPQPAGAYMDLVQTGGDLGLIEEGRVVVIDPGFFSVDWVALEAGEIRYSSSGTSLQAMSVLLETIDKLISEDHGAKVGMDRLEKAMRTGDLQVLLFGEKVDISPYLNAAMKKVAPVALTAMRQSMRDESINADLVLIAGGGALAYKEAAKEIFSRSKIIVPEQSVLANVRGFWFYGA

SEQ ID NO: 286 - protein, 383 aa, Geobacillus sp. G11MC16
MKLVVANDIGNSETKMIVNDTLIKQPSVVKRLLSKPNVTETNVEKNIANLLDELIVHVTSNAIKRSGLYFIGKRANMTADKVENMNIKLGNKSKHDIPVLMTLSMLAARSVQLAYQENQELPPSISVDVSMTTAIPASEYSADQARYLEGRFTSNDHVVIVYVGETPVTVTLHFQTVKVTQEGIPALYALLESENEILKNYNEHYKKQAVPKDFANKRILHVDIGDGTTEYVYTVGINPVTDVCSGEKRGVGHATEEATQLLKEEVGGFLNLNRQQFMDIFRDPSHHLHDLAVRFMQEARYSQAQRILEDIQEKYSDIAGNVDVIAVYGGGSIQFKEELYEELLDFANTVHCEVLWIPEKYAVDMNVNGLHVINEKILFKQHA

SEQ ID NO: 287 - protein, 343 aa, Bacillus phage IEBH
MLLGNPYAIDLGNGFTKRASKKNKSLEADVITELSVLAPVDDYYNEASFTKIELTNTDFPYYIGEEARKSKLPLIRALGENKAKRYEDPTFKKQLFGFIAKDFKKNVTIPLLVTGLPVSHFGNQRESIRKVAMEETAVKVNGELITVKVKECLVIPQPVGTQYYLVKKEIINKEDRILIIDGGFGTFDVTDMSGNAVIDRLGTELGCEKAFMAIEQIVRDNIGETPDLSVSNMHYILENGYKYNGSLYDLYTHKDVAEKVDEELQRHFDAALREVSQKFNLAVYDKIVWTGGMAALHKKRIEKKKEQFPTFAVLENGQEANLLGYYYLGCDVFDKLTKEKAAN

SEQ ID NO: 288 - protein, 407 aa, Bacillus cereus H3081.97; identical to SEQ ID NO: 133

SEQ ID NO: 289 - protein, 374 aa, Arthrospira maxima CS-328
MQSNKQPGQSQSQSPLAKATTTTTKPTTTTVVGRSTILSVDLGRTATKSCISRNPADVVFVPSNVAQMSVEKARGGGFESKNTDPLLDLWLEYQGNGFAVGQLAADFGASLFGVDPAANPSKVNDALIKIFACVGYFNLKGDLDVVLGLPFYSQEQFEREKEQIISLLTGPNTLVFRGEQVVVDIQSVRVMPEGYGSLIWCEAQGSKDAPNFADLSVAVVDVGHQTTDFLTVDRFRFARGVSQSEVFAMSKFYEEVAAKIEGADAQSLFLLEAVHKPQGQRFYRPRGATKPANLDEIVPELRKVFARDLCDRVVKWLPERVTDVVITGGGGEFFWQDLQPLLKDAQLRAHLTQPARKANALGQYVYGEAQLAKR

SEQ ID NO: 290 - protein, 339 aa, Bacillus phage SPO1
MTHISAIDIGFLYTKAIIDGKQVKFKSVVGNGREQNFQNLDFGMNNSEDNITVKTGLDVNFVSDLAINQSDVVLHSLEADRFSNEVTKQLVLTAFGLGFGSDHVETKIVSGLPVSHYSKYQEEIKKLFVGDGSYKIHNFDVTSKGYQIKGSAKVVEAEFIPQPFGALLDRILDKDGDIADKELAKQTVAVIDPGFGTTDVYVSRSLSPIERLTFSTPTAMNFAYDLIANKIEEQTGISLAHYKLEKAVSNKYYRVEGKQYDLTAIIQWAFRSASTQLVTEVLNRWKANSKEIDKVLIAGGTGAAWSKWLKEKFPTAEILEDTQWAVANGYYKWGVRKFG

SEQ ID NO: 291 - protein, 317 aa, Anaerocellum thermophilum DSM 6725
MKCAVDVGFGFTKAVNEKGKEVIFPSAVAKTFLTDIGLKPTSEYFITYMNQTYAVGKAATHCMITETSFSDDRFVSEFSKLLILTALMALDSDREIELGLGLPLMLYPKLKEKVRDYFEFAEEIIVDSNNVAHTYHITRCEVFPQGVGALFSIDSNIEKGIYCVLDIGFRTTDVIVVEVNENNINPLLELCFTLDKGMSMAIEKLSIILERKYGVSYDTNLLLDIHERSQISVRGRKINIEEQKKEVFNTIANDIVQSISRKLQRGFDTFDGVFVAGGGAFNIAAVLQKEFENVQVINNAQFANAKGFLNLLSILDE

SEQ ID NO: 292 - protein, 370 aa, Carboxydibrachium pacificum DSM 12653
MRRKIDAPIRRFFIFAKKFKGGGVQVFKIGLDLGYGYVKGVNEAGKTVLFPSLVGNAYQRNLIGLFWQNLNNLIENMHVVLRNGKEEQEEYFIGDLARREGRNVSYAFDENKINHPNTKAVLASASALLFPSNDEPVHIVSGLPLEQYIHQKDELREMLKNFKAIVEFKGYNILKIVKFDRVTVFPQAAGAVYYAIMDDLQKYLIKGSYIGLIDIGYRTTDYIVFVVDGKLSLREDLSGTLDIGMSQLSNAADKLFTQRTGSKLDIPELIQLVNEGSIFYRGKILNFEKELNEVKLEISRVIQDRIKAVWGSKLDFFNTIFLAGGGAVSLFDSLKNLYENTVLVKNSQFANAKGFLKVAELEEKKERDRE

SEQ ID NO: 293 - protein, 344 aa, Carboxydibrachium pacificum DSM 12653
MFKIGLDLGYGYVKGVNEAGKTVVFPSLIGNAYERNLKILFENGFERKIDNMHLIIMNGQKQEYFVGELARRESRNVSYAFDEDKINHPNTKALIAASCLLLFPEDGRPVHLVTGLPLEQYIHKKEEFKEMLKDYKTIACFKGDERVKGIKFDKITIFPQAAGAVYFAVMEDLHRYLVKGSYLGLVDIGFKTTDFIVFLVEDRLVLREDLSGTIDLGISAVYNAADKLFTQKTGSKLDVPELMRLTADGKIFFKGKQLNFTEELKNIKAETARVIKDRLKAVWGNKLDFFNTVFLAGGGSKDLQEFLNDIYENTVIVKDPQLANARGFLKVAELEEKKTNTKEG

SEQ ID NO: 294 - protein, 347 aa, Alicyclobacillus acidocaldarius LAA1
MLTIGLDVGNGSIGLCVRDGDTLVQDTMPSVYGRVDLTRRVLSVPGRSASREVDVFTFGGEHFVLGYQNVHVMHSTPIGAYDREQRYASRQLETLAKLALLDAATRTGRTGVIEVAVACGTPSEDFTTRTVEIMQRWFSEPVTGAKNGEQVVVMIKRLEVIPQPFAVFLDAYLDQDGLVVDEELEKQDVLVIDSGSGTLDLSEIHRLELTRQTSIPAGLNDVYQLILEEIRREEPKVYATAYDLEAQLRAQDGAQEFWFEYGALRMNITELRERAMRQVWDRMQQGIQYAYPDRSSFGRVILAGGSGEAFRNYFLAWMPSIRIAPEPQLAVARGLYKYALAQGAEES

SEQ ID NO: 295 - protein, 313 aa, Acidithiobacillus ferrooxidans ATCC 23270
MTCLGMDVGHSSVKLSWRCPDGKVVKLMIPSVVIPAMRITDKTAADTALDDTVDVAGNTYFIGNTALHEVGNLRVSGLHDRWLDMKEFRALVQGAIDKVTRNAGKIERIVTGLPASTFHEQQLKMRNIVSACLDTQIRVLPEPNGIYLQHMIGLEGGVRKDRVVNAGIVAIGRYTTDFMALLDGRWVEGVAGSCSGMSRAANLLLKQLKNEGLDVDYLDADDALWKREIRNYGKTVDVSRDADRALSILGSEIFDSASARFGDVGRKLEKIFVGGGGADLLIGELTEYWPQAELVEDPRFAVAEGFRRLGESL

SEQ ID NO: 296 - protein, 349 aa, Lactobacillus gasseri
MDIFSLDLGNKQTKLKSSKAEYVLPSRYLNQADMPMSVGNSTMNNDLHTYSVPFSDDKYVWGRDIDRLHLDEYLADTIMYGARYDSEAFKLLANFALGLLASDFKAAKDQVLEVVVTAGLPTGDYANQGQLKALLKVLEGQHQATIDDKIVTVRVRKVYILPQPIGTLYNELLDDEGFIQNKDLLDEKVGIVDVGGGTILIDTILNFELSGKNRHQFNTGVNDLYEAIANGINGDTSLYQLEKDLRKGNQQHHWSYRFSKNRQDDITDLVCKEIDRFTRRLVANVTSTLKNLNSIDTLFFTGGGANLLNQKILNTTFTNAVIVENTEVANVNGFYKYGLSQQAQEEGSK

SEQ ID NO: 297 - protein, 341 aa, Bacillus cereus Q1
MKSLYAIDVGIGFTKRAYRQDVDSEVTIKSEASTLAPVPNHDESEDLTKVSFIDLDFAYYMGNEAHQSDASLLPPFDEEIENYYESERFKQQIFGCIAKDYKENVVLPLVVTGLPVTYFGSQHEQLQRALKKETSVQIDGKFITITVENALILQQPVALHAYFLKEGIIQERDRILIIDGGFRTLEMTDMKQNVILNHYETELGCSKPLKNIKNIVQNHAGESNQLHINDMPNILEKGYGGREEDTQTSQVHTLIQKELDAHFQDVMRVLQEQFKLDQYDTIIWTGGIVDLHKKRIEKMQGEISSFRMVDASKEAALHGYYMIGSQVFDDITNQSVYESKL

SEQ ID NO: 298 - protein, 336 aa, Bacillus cereus Q1
MTKVFAIDHGNGAVKMRTDVFKKTLPAIYSFSSNVGEALSGGKMKLKTYKVEGTEYVWGDDIIKVSNTLNTYAQQNRYKTNQYKTLSKIALAEMAAKTNVKSYDEILVITGVPSQEIGTKAVDEIKEVYQGTHEVEVNGKKVIINVVDVIVLAQPVGTVMSRYLDEDGFVADDSYEDMTVGIIDIGTGTTDLDVISMLRREKESTSVPKGMHDVYEPIVAKIKKETSATINDYKLEKVFEEGAYQASKRMDPIDFNDEKTASIKEVYDFIVNGVNNAWKTFDRFDEVLVSGGGANTFHELLEEWIGKVTKLEESQTANVEGFYRYGKFEVGEEDGE

SEQ ID NO: 299 - protein, 380 aa, Desulfobacterium autotrophicum HRM2
MEVVGIDVGFGFTKAFNGKNSVVFKSVLGDSTQIQFRSSLGDDQDNSNLHVTLDGKSYFIGSYAEQQSNVKEFTLDQDKLLTDFVKVLALTAIGVCCENNASLNVVSGLPVGFLTRDYKRFADLLTGRHEIIFHYENKDDITRRIHINKIQMIPQPIGSIFNLLMDDRGKITDRKLSGQKIGVVDIGFKTTDFSIFDHLQYIERSSTTMDTGISKCFSLIANKLRQESGVNIELYRMFSFIESGAIKIRGREYNIANLKKRVYAHAAAAIAADVNRLWEEDWDMDSIILSGGGSMELAPFLRSLIQGNVIPIANDVDTRLNNVQGYLKFGRHKWGYTETPVSDLPDNKETTTETNKDTALESDQNSGETKGRGWLKGSRT

SEQ ID NO: 300 - protein, 306 aa, Helicobacter pullorum MIT 98-5489
MDAQRIAIDIGYGDTKVMANGKLFKFPSAISQVGESMLQLDFKSDNPIFEGIEYRVGSKALMEAVATRGYLFLKRYSPLLIHNALLEAKFDLEAPIEIATGLSIVNNLEAQNFLEIISNFTINQIQIKPRVFLFAQGQGLYYQSGLDKEDRACVIDIGYNTLDFLVFENGKPRVDLCFANKKGANLAITNLQKFLIKEFRVDFNEQEAKEVFVKKEIEIAGKKIDFSDVINSIMQRYVRTITDEVFSKAEDILSKTKNIVIGGGGAYFLKKEYLEDLHKANYLFLDNPEYSNVLGYYKSAFKTKGV

SEQ ID NO: 301 - protein, 349 aa, Lactobacillus paracasei subsp. paracasei 8700:2
MDIFSLDLGNKQTKLKSSKAEYVLPSRYLNQADMPMSVGNSTMNNDLHTYSVPFSDDKYVWGRDIDGLHLDEYLADTIMYGARYDSEAFKLLANFALGLLASDFKAAKDQVLEVVVTAGLPTGDYADQGQLKALLKVLEGQHQVTIDDKIVTVRVRKVYILPQPIGTLYNELLDDEGFIQNKDLLDEKVGIVDVGGGTILIDTILNFELSGKNRHQFNTGVNDLYEAIANGINGDTSLYQLEKDLRKGNQQHHWSYRFSKNRQDDITDLVCKEIDRFTRRLVANVTSTLKNLDSIDTLFFTGGGANLLNQKILNTTFTNAVIVKNTEVANVNGFYKYGLSQQAQNEGSK

SEQ ID NO: 302 - protein, 379 aa, Nostoc azollae 0708
MTDQPPVANPMNAAAIPMNRVAPTPINNNVNKPVSVSGKNILSVDLGRTSTKTCVNREPANVAFIPANVKQMSIEQIRGGVFESKATDPLMDLWMEYQGNGYAVGQLAADFGANLGVGQSKVEDALAKVLVAAGYFKLKDEISVIVGLPFLSLEQFEREKAQLMSLISGPHVMNFRGETVSLNVTKVWVMPEGYGSLLWCETQPNKGSSMPDLTKVSVGIVDIGHQTIDLLMVDNFRFARGASKSEDFGMSKFYEMVAKEIEGADSQSLALISAVNKPKGDRFYRPKGASKPANLDDFLPNLTEQFSREICSIVLAWLPERVTDVIITGGGGEFFWEDVQRLLKEAKIHAHLAAPSRQANALGQYIYGEAQLSAVRAAR

SEQ ID NO: 303 - protein, 313 aa, Dethiobacter alkaliphilus AHT 1
MKESVVGIDLGFGWTKAGHNGQFFRCPSVVGEAVNLFESPTGIENNIQLWYNDQHYFVGELAIRQATIKYFSMAANKARSDISAILAATALAALKPGRVNIVTGLPVDFYFQYKDDLDNQLQHLPNRVRIQMDNKTYNCALEVQQTKIVPQPLGSAMSLILDSRGNTIDHRLASKNILVVDVGFHTLDILALSALEIIRPFSFTRPLGMAVAYKGISQDLGGLPLYDVDRLFIKNQLQNHTAAFQSLARQITEEIAGLNQKFDHYLITGGGGAQLYNWLLPGFERILVPDAQQANVVGYQKLGAKTWSKRNIS

SEQ ID NO: 304 - protein, 280 aa, Persephonella marina EX-H1
MKVAFDLGFGWTKVCTDTGECFKFPTWLAYHSDTAISEVDKVLVDGKEYVVGEDARLERQRITITSIQELLNYFPVFKRYSLEKLGISESEAQIITGLPPIHKDKAEILEKQGAVVLPQGLGIFLDVADKVSEEELMIIDIGFNTVDYIVVIKNKRKKGNTIEKQGVERMIELFRNKLPDSLGYLKQFSFQRLMDVFEKGYATVEGERIDLTSYKERAIEEYNEVLKTRLKDEIGNLIDEIERIVIAGGGAYYLKDIRKAGIYIPEKPEFSQARGYLKYE

SEQ ID NO: 305 - protein, 301 aa, Clostridium difficile QCD-63q42; identical to SEQ ID NO: 129

SEQ ID NO: 306 - protein, 314 aa, Clostridium difficile QCD-37x79
MKKEKVKVAVDLGNSMLNSAAYIEKELILKKLPNKLQFEKTISPKARVMKKDGKVIYLGVGDLNNNVLKHTRKNLLEQVLVMIHEIFPDEDNLSVELITGLPPTQMFNEKYLKLFQDIFIQPGEIKITIDGKQKTFEILNVDVKAEGYSGFISLVDKITTKQNILGIDVGGSTTDLCNYEYDYEDDMYYPNVTDTIEKGIIDFETAIANKFNSKNGADIKISQIDVILRNDIDVIEYEGSKYKLDDYIDAMYPIIDDMINKITNKFGQLDGYYVVGIGGGYKTFNKYANQFISKQLEVDDDSRFYANVIGYLEQ

SEQ ID NO: 307 - protein, 341 aa, Bacillus cereus 03BB102
MKSLYAIDVGIGFTKRAYRQGEDSEVTVKSEASTLAPVPNHDESEDLTKVSFIDLDFAYYMGNEAHQSNASFLPPFEEEIENYYESEQFKQQIFGCIAKDYKENVVLPLVVTGLPVTYFGSQHEQLQRALKKETSVQIDGKFIHITVENALILQQPVALHAYFLKEGIIQERDRILIIDGGFRTLEMTDMKQNVILNHYETELGCSKPLKNIKNIVQNHAGESDHLHINDMPNILEKGYGGREENPQASQVDTLIQKELDTHFQDVMCVLQEQFKLDQYDTIIWTGGIVDIHKKRIEKMQGEISSFRMVDASKEAALHGYYMIGSQVFDDITNQSVYESKL

SEQ ID NO: 308 - protein, 340 aa, Citrobacter sp. 30_2
MSNDKLVVCGIDIGYSNVKIAVGDPADDKPTVSIYPAYATNEAVEDVRLVKRNCEHEVLVYPGGKEWRAFTERPDARELHDRYHMTEMYLALYLASLDKIAAKSGNDIDLVVTGLPVRLANDSERAKLTARLTGTFTIAPGKTVTVKKCLVLQQGVGVINDIVNRPGLISQEELEKATILVVDPGFFSMDYIAFKSGSRVSGSSGSSLKATSAIIESIVNRLNAVNPEERIDDLPEIIEIALRNNEPSFFNGFRHIPLRPLLEEAIPSIASDVVKELRKSTRVLGPVHIIAAAGGGTGFYEQTIREEFPRARIVSSPLPVASNAIGFWNYGVDLMLYGDD

SEQ ID NO: 309 - protein, 349 aa, Lactobacillus gasseri JV-V03
MEIFSLDLGNKQTKLKSSKSEYVLPSRYLNQADMPMSVGSSTTNNDLHIYSVPFSDDKYVWGRDIDGLHLDEYLADTIMYGDRYNSEAFKLLANFALGLLASDFKIANNQVLEVVVTAGLPTGDYADHERLKSLLKVLEGQHQVTIDDQIVTVRVRKVYILPQPIGTLYNELLDSQGFIKNKALLDEKVGIVDVGGGTILIDTILNFELSGKNRQQFNTGVNDLYEAIASRIEGDVSLYQLEKELRHGNQQHQWSYRFSKNRQDDITELVGKESNRFTRRLVANVTSTLKNLDSIDTLFFTGGGANLINQKILKTTFTNAVIVKDTEVANVNGFYKYGLSQQAQDKEGK

SEQ ID NO: 310 - protein, 349 aa, Lactobacillus ultunensis DSM 16047
MEIFSLDLGNKQTKLKSSKSEYVLPSRYLNQADMPMSVGSSATNNDLHTYSVPFSDDKYVWGRGIDGLHLDEYLADTIMYGDRYNSEAFKLLANFALGLLASDFKIANNQVLEVVVTAGLPTGDYADHERLKSLLKVLEGQHQVTIDDQIVTVRVRKVYILPQPIGTLYNELLDSQGFIKNKALLDEKVGIVDVGGGTILIDTILNFELSGKNRQQFNTGVNDLYEAIASRIEGDVSLYQLEKELRHGNQQHQWSYRFSKNRQDDITELVGKESDRFTRRLVANVTSTLKNLDSIDTLFFTGGGANLINQKILKTTFTNAAIVKDTEVANVNGFYKYGLSQQAQEKEGK

SEQ ID NO: 311 - protein, 317 aa, Denitrovibrio acetiphilus DSM 12809
MIGIDVGYGDVKAVYVEDGELKYFKLPTAVAYAPSNSIDIIDSAEVVYSFQGREYIVGESARFGAFSTRSFDFLKRYSPLFIHHTLKVLKIEPTHVATGLPLGLFNRKDEMTKELITAQVDGNTIKAEFSMFPQAVGILLDYRMDDAGKVKADTAKNGIVLDIGFNTIDVLCFEKGTAIRSDAKTLDKFGISKIVLELVELINREHGIQLSDQEAKDVFLAGQMNVYGSRIDLTEAIRNITEMYFDEVMHNIRSLWDKRLQRADLLLLAGGGAVTIAKYVPSEYAKIVKVPERSEFANARGYFKALMAKQEQALKAD

SEQ ID NO: 312 - protein, 318 aa, Denitrovibrio acetiphilus DSM 12809
MIGIDVGYGDVKAVYMDVGELKYFKLPTAVAYAPMNSIDIADEAEERYSFQGREYIVGESARFGAFSTRSFDFLKKYAPLFIHHTLKVLRLVPSYVATGLPLGLFNRKDEMTKELTTAQVDGNTIKAEFSMFPQAVGILLDYRMDDAGKVKADTAKNGIVSDIGFNTIDVLCFEKGTAIRSDAKTLDKFGISKIVLELVELINREHGIQLSDQEAKDVFLAGRMNVYGNKIDLTEAIRNITEMYFDEVMHNIRSLWDKRLQRADLLLLAGGGAVTIAKYVPSEYAKIVKVPERSEFANARGYLKALMAKQEQALKADK

SEQ ID NO: 313 - protein, 408 aa, Lactobacillus salivarius ATCC 11741
MSKNNVVKMNVANDLGYGSVKAKVNDTKIHFPSVLALQREQDIAKPVEFDSEKEKLSYLSDMINHMDITVSSSAVKTQGRFLLGTAAVKSSLPMRAFDVNDFTGKSDNDLSIILTLGMIAAQRVALAVENGEDLSEQLNAEVNMTTALPVSEGKKNGIVDSYINKYVNSKHTVVFHNLKDPITVSLTFNKVYVALEGEVAQLYIQNSDIKLKGLIKKDFAKNYPELATEIEVTDLVKIKNLLGIDIGEGTTDLVVIKDGKANAVSSTSLPTGYGNALQDAIDVLQTQNMNFEARSQLQDYLSQDVSPLAKRMQNKVRQTVFEQLAPFADKIVEAASKTMRKAGANVEVLYVYGGGSIPMLEQTELRQKLAQKMKDFSGGIDVPVIWIDKSYAQILNEKGLELVLNVLK

SEQ ID NO: 314 - protein, 342 aa, Lactobacillus salivarius ATCC 11741
MEIFSLDLGNKQTKLKSSKNEYVLPSQILNGEDMPQQLSDFGKKRDINYFKVPFDDSEWIWGKDLSTLKRDDYLQDTLMHQNRYSNDTFKLLANFALGLLATDFEKAVENILEVTVVTGLPTDDYNSQKQLKDLSSILKGQHQIEVDGVTYTVRVKHVLIIPQPVGTFYDVLLDDEGVLVNDELLEEKVGIVDAGGGTILIDTLLNFELDKRNRRQYATGANDLYEAIMSQMDGNVSLYQIEKMVRNGIKERKFSYRYSKNHIEDVTDLVEKEITNFTRRLVSNLKSTFKDIDSIDTLIITGGSANLINQRLIVDFFETAYFVKDSELANVRGFYKYALTAE

SEQ ID NO: 315 - protein, 317 aa, Alicyclobacillus acidocaldarius subsp. acidocalda6
MIVGLDVGFGHLKWTTDGHTVHRMPAVAAPTWTEPDVVSGDHAWVVGEHAEREDATLAVALDHERLSRPEFQALLGYVFATLPDEPLQVVSGLPYSATEEEQANYERQLREIVGPYQVGERVWKGPVPSVTLFRQAQAALIDALFDERNRPRRPELLQEGLRIALIDVGYKTTDVVVAVLFPAYQIVREMSLSLDVGVHNVEAMLQRAYQRAYGAEMLDRERMRLALDGKRIYRFGQPVTLPVDEARRQVAERIRAGVVQHWGRAISTVARVFLAGGGAALLGAYLAQPPLVAEMVPDPQGANARGFYKLGRFAETA

SEQ ID NO: 316 - protein, 347 aa, Alicyclobacillus acidocaldarius subsp. acidocalda6
MLTIGLDVGNGSIGLCVRDGDTLVQDTTPSVYGRVDPTRQVLSVPGKSAPRKVDVFTFGGEHFVLGYKNVHAMHSTPIGAYDREQRYASRQFETLAKLALLDAATRTGRTGVIEVVVACGTPSEDFTTRTVEIMQRWFSEPVTGAKNGEQVVVMIKRLEVIPQPFGVFLDAYLDQDGLVVDEELEKQDVLVIDSGSGTLDLSEIHRLELTRQTSIPAGLNDVYQLILEEIRREEPKVYATAYDLEAQLRAQDGAQEFWFEYGALRMNITNLRERAMRQVWDRMQQGIQYAYPDRSSFGRVILAGGSGEAFRNYFLAWMPSIRIAPEPQLAVARGLYKYALAQGAEES

SEQ ID NO: 317 - protein, 338 aa, Alicyclobacillus acidocaldarius subsp. acidocalda6
MVIGVDLGYGWVKATNGERSNRFPALVGEAHELLLSDLFGVPEYDVHIETPFGSRRVFVGELARQESQAAWNLATKKFEDTDTEALWLTALALFARDGEPLDVVTGLPLAHYEAQRAALRERLLSLRGRVTIQGRIVEVEARSVRVIPQAMGAMIASLLDPATLELRNPAWTEHGGYLLLVDVGTRTTGFVTFETQPELRLMNRLSDSVDVGVHDLYVALASVFRQRTGETPPLSDGLYDELYARGEVFYGGHTVSVEPERSRHIERMGGLIVRRIQEHLGAEALKRVHTVFVAGGGYRIVQTTLQRMFPRVVVVPNPQMANAEGYRLYGLTRAGSGR

SEQ ID NO: 318 - protein, 341 aa, Bacillus cereus m1293
MKSLYAIDVGIGFTKRAYRQDVDSEVTIKSEASTLAPVPNHDESEDLTKVSFIDLDFAYYMGNEAHQSDASLLPPFDEEIENYYESERFKQQIFGCIAKDYKENVVLPLVVTGLPVTYFGSQHEQLQRALKKETSVQIDGKFITITVENALILQQPVALHAYFLKEGIIQEQDRILIIDGGFRTLEMTDMKQNVILNHYETELGCSKPLKNIKNIVQNHAGESNQLHINDMPNILEKGYGGREEDPQTSQVHTLIQKELDAHFQDVMRVLQEQFKLDQYDTIIWTGGIVDLHKKRIEKIQGEISSFRMVDASKEAALHGYYMIGSQVFDDITNQSVYESKL

SEQ ID NO: 319 - protein, 341 aa, Bacillus cereus ATCC 10876
MKSLYAIDVGIGFTKRAYRQDVDSEVTIKSEAATLAPVPNHAESEDLTKVSFIDLDFAYYMGNEAHQSDASFLPPFEEEIENYYESEEFKQQIFGCIAKDYKENVVLPLVVTGLPVTCFGSQHEQLQCALKKETSVQIDGKFINITVENALILQQPIALHAYFLKEGIIQEQDRILIIDGGFRTLEMTDMKQNLILNHYETELGCSKPLKNIKNILQNHAGESNQLHINDMPKILEKGYGDKEENYETSQVDILIQKELDTHFQDIMRVLQEQFKLDQYDTIIWTGGIVDLHKKQIEKMQGEIVSFRMVDASKEAALHGYYIIGSQVFEDITNQSAYKSKL

SEQ ID NO: 320 - protein, 343 aa, Bacillus cereus BGSC 6E1
MLLGNPYAIDLGNGFTKRASKKNKSLEADVITELSVLAPVDDYYNEASFTKIELTNTDFPYYIGEEARKSKLPLIRALGENKAKRYEDPTFKKQLFGFIAKDFKKNVTIPLLVTGLPVSHFGNQRESIRKVAMEETAVKVNGELITVKVKECLVIPQPVGTQYYLVKKEIINKEDRILIIDGGFGTFDVTDMSGNAVIDRLGTELGCEKAFMAIEQIVRDNIGETPDLSVSNMHYILENGYKYNGSLYDLYTHKDVAEKVDEELQRHFDAALREVSQKFNLAVYDKIVWTGGMAALHKKRIEKKKEQFPTFAVLENGQEANLLGYYYLGCDVFDKLTKEKASN

SEQ ID NO: 321 - protein, 341 aa, Bacillus cereus 172560W
MKSLYAIDVGIGFTKRAYRQDVDSEVTIKSEAATLAPVPNHAESEDLTKVSFIDLDFAYYMGNEAHQSDASFLPPFDEEIENYYESEEFKQQIFGCIAKDYKENVVLPLVVTGLPVTCFGSQHEQLQRALKKETSVQIDGKFINITVENALILQQPIALHAYFLKEGIIQEQDRILIIDGGFRTLEMTDMKQNVILNHYETELGCSKPLKNIKNILQNHAGESNQLHINDMPKILEKGYGDKEENYETSQVDILIQKELDTHFQDIMRVLQEQFKLDQYDTIIWTGGIVDLHKKQIEKMQGEIVSFRMVDASKEAALHGYYIIGSQVFEDITNQSAYKSKL

SEQ ID NO: 322 - protein, 341 aa, Bacillus cereus MM3
MKSLYAIDVGIGFTKRAYRQDVDSEVTIKSEASTLAPVPNHAESEDLTKVSFIDLEFAYYMGNEAHQSDASFLPPFDEEIESYYESEQFKQQIFGCIAKDYKENVVLPLVVTGLPVTYFGSQHEQLQNVLKKETSVQIDGKFINITVENVLILQQPVALHAYFLKEGIIQEQDRILTIDGGFRTLEITDMKQNVILNHYETELGCSKPLKNIKNILQNHAGESDDLHINDMPKILEKGYGGREENHQTSQVDTLIQKELDTHFQDVMRVLQEQFKLDQYDTIIWTGGIVDIHKKRIEKMQGEISSFRMVDASKEAALHGYYIIGSQVFEDITNQSAYESKL

SEQ ID NO: 323 - protein, 389 aa, Bacillus cereus MM3
MSILLKAGADAGNNGLKLMVKGQDPIFIPSIYSLYIGEPTGLLDESDVSLSELENHIDVTISSPSLMLNNVRYIVGEKVIQDQLKGTEVEKKSNKSTDELMVITILSGLAVSAMRQSPTSGHINIRYDLSVALPMQLITQEIAAENAKRYMGNHKVVFHYPNGRDVTINISIEYCKCLPEGASGTWGIVYDEEGNVVKHKIECEQNQVSEIDFVDKTLLSFDIGAGTTEEVVSLGVNFRPQLSKGLSYGVKETLLQIITRWNRKYPTKTIDSITEFNQIYLHEKHPRNALLVEESQPALLGLAARVATDIINKIDDMKDDPYVFIYGGGAVIIKNSLKMILKQKGRLTNVIFVDNPLFTNARGLLVYTCSPKYREHKQKELGFTNLTIS

SEQ ID NO: 324 - protein, 388 aa, Bacillus cereus AH621; identical to SEQ ID NO: 6

SEQ ID NO: 325 - protein, 389 aa, Bacillus cereus R309803
MSILLKAGADAGNNGLKLMVKGQDPVFIPSIYSLYIGEPTGLLDEGDVSLSELENHIDVTISSPSLMLNNVRYIVGEKVIQDQLKGTEVEKKSNKSTDELMVITILSGLAVSAMRQSPTSSHINIRYDLSVALPMQLITQEIAAENAKRYMGNHKVVFHYPNGRDVTINISIEYCKCLPEGASGTWGIVYDEEGNVVKHKIECEQNQVSEIDFVDKTLLSFDIGAGTTEEVVSLGVNFRPQLSKGLSYGVKETLLQIITRWNRKYPTKTIDSITEFNQIYLNEKHPRNALLVEESQPALLGLAARVATDIINKIDDMKDDPYVFIYGGGAVIIKNSLKMILKQKGRLTNVIFVDNPLFTNARGLLVYTCSPKYREHKQKELGFTNLTIS

SEQ ID NO: 326 - protein, 341 aa, Bacillus cereus ATCC 4342
MKSLYAIDVGIGFTKRAYRQDVDSEVTIKSEASTLAPIPNHAESEDLTKVSFIDLDFAYYMGNEAHQSDASFLPPFDEEIENYYESEQFKQQIFGCIAKDYKENVVLPLVVTGLPVTCFGSQHEQLQRALKKETSVQIDGKFITITVENVLILQQPVALHAYFLKEGIIQEQDRILIIDGGFRTLEMTDMKQNVILNHYETELGCSKPLKNIKNILQNHAGESGHLHINDMPKILEKGYGGREENHQTSQVDTLIQKELDTHFQDVMRVLQEQFKLDQYDTIIWTGGIVDIHKKRIEKIQGEISSFRMVDASKEAALHGYYMIGSQVFDDITNQSVYESKL

SEQ ID NO: 327 - protein, 389 aa, Bacillus cereus ATCC 4342
MSILLKAGADAGNNGLKLMVKGQEPVFIPSIYALYIGEPTGLLDEVDVSLSELENHIDVTISSPSLMLNNVRYIVGEKVIQDQLKGTEVEKKSNKSTDELMVITILSGLAVSAMRQSPTSSHINIRYDLSVALPMQLITQEIAAENAKRYMGNHKVVFHYPNGRDVTINISIEYCKCLPEGASGTWGIVYDEEGNVVKHKIECEQNKVSEIDFVDKTLLSFDIGAGTTEEVVSLGVNFRPQLSKGLSYGVKETLLQIITRWNRKYPTKTIDSITEFNQIYLNDKHPRNALLVEESQPALLGLAARVATDIINKIDDMKDDPYVFIYGGGAVIIKNSLKMILKQKGRLTNVIFVDNPLFTNARGLLVYTCSPKYREHKQKELGFTNLTIS

SEQ ID NO: 328 - protein, 341 aa, Bacillus cereus m1550
MKSLYAIDVGIGFTKRAYRQDVDSEVTIKSEAATLAPVPNHAESEDLTKVSFIDLDFAYYMGNEAHQSDASFLPPFEEEIENYYESEEFKQQIFGCIAKDYKENVVLPLVVTGLPVTCFGSQHEQLQHALKKETSVQIDGKFINITVENALILQQPVALHAYFLKEGIIQERDRILIIDGGFRTLEMTDMKQNLILNHYETELGCSKPLKNIKNILQNHAGESNQLHINDMPKILEKGYGDKEENYETSQVDILIQKELDTHFQDIMRVLQEQFKLDQYDTIIWTGGIVDLHKKQIEKMQGEIVSFRMVDASKEAALHGYYIIGSQVFEDITNQSAYESKL

SEQ ID NO: 329 - protein, 343 aa, Bacillus cereus BDRD-ST24
MLLGNPYAIDLGNGFTKRASKKNKSLEADVITELSVLAPVDDYYNEASFTKIELTNTDFPYYIGEEARKSKLPLIRALGENKAKRYEDPTFKKQLFGFIAKDFKKNITIPLLVTGLPVSHFGNQRESIRKVAMEETAVKVNGELITVKVKECLVIPQPVGTQYYLVKKEIINKEDRILIIDGGFGTFDVTDMSGNAVIDRLGTELGCEKAFMAIEQIVRDNIGETPDLSVSNMHYILENGYKYNGSLYDLYTHKDVAEKVDEELQRHFDSSLREVSQKFNLAVYDKIVWTGGMAALHKKRIEKKKEQFPTFAVLENGQEANLLGYYYLGCDVFDKLTKEKASN

SEQ ID NO: 330 - protein, 384 aa, Bacillus cereus BDRD-ST26; identical to SEQ ID NO: 7

SEQ ID NO: 331 - protein, 371 aa, Bacillus cereus 95/8201
MFLTASVDAGNDALKAYIGGLEEENKVYIPNVVKKMEDRPILSLGDDPLAELHLRITSSAINISGTYAVGTLAVKEKDSSHIPATVMKSDSDQTVILALTALAYYAAMNSKAKKVDVEYLLSSGLPVDEVKADRRASFKEKLVEGTHVIEFKKTPLLEGKTVNIKFRDAFMNVEGFAAMVNLTVDDKLQAINNDLKQKNILLNDMGGNTTDKAVIRMGRIDNEYSSGSPLGIGEYLDAIKKEVFTTFRVDVFKSRRQLVENMTAEKEAYVIRPHGKAESYQAIAEKHLMEFAMREYADLVEKWKEVGDLHCIYNVGGSAAIAKPFLEQINKENNQFEMYFLDTEESIWSIAKAYYKLLLIIAKQKGLDLKK

SEQ ID NO: 332 - protein, 341 aa, Bacillus thuringiensis serovar pondicheriensis BG1
MKSLYAIDVGIGFTKRAYRQDEDSEVTVKSEASTLAPVPNHDESEDLTKVSFIDLDFAYYMGNEAHQSDASFLPPFEEEIENYYESEQFKQQIFGCIAKDYKENVVLPLVVTGLPVTYFGSQHEQLQRALKKETSVQIDGKFIHITVENALILQQPVALHAYFLKEGIIQERDRILIIDGGFRTLEMTDMKQNVILNHYETELGCNKPLKNIKNIVQNHAGESNQLHINDMPNILEKGYGGREENPQASQIDTLIQKELDTHFQDVMCVLQEQFMLDQYDTIIWTGGIVDLHKKRIKKMQGEISSFRMVDASKEAALHGYYMIGSQVFDDITNQSVYESKL

SEQ ID NO: 333 - protein, 341 aa, Bacillus cereus Rock1-3
MRSLYAIDVGIGFTKRAYRQDVDSEVTIKSEASTLAPVPNHAESEDLTKVSFIDLDFAYYMGNEAHQSDASFLPPFDEEIENYYESERFKQQIFGCIAKDYKENVVLPLVVTGLPVTCFGSQHEQLQRALKKETSVQIDGKFINITVENALILQQPVALHAYFLKEGIIQERDRILIIDGGFRTLEMTDMKQNVILNHYETELGCSKPLKNIKNIMQNHGGESNHLHINDMPKILEKRYECREENPQTKQVHTLIQKELDAHFQDVMRVLQEQFKLEQYDTIIWTGGIVDLHKKRIEKMQGEISSFRMVDASKEAALHGYYIIGSQVFEDITNQSAYESKL

SEQ ID NO: 334 - protein, 341 aa, Bacillus cereus Rock1-15
MKSLYAIDVGIGFTKRAYRQDVDSEMTIKSEASTLAPVPNHAESEDLTKVSFIDLDFAYYMGNEAHQSDASFLPPFDEEIENYYESERFKQQIFGCIAKDYKENVVLPLVVTGLPVTCFGSQHEQLQRALKKETSVQIDGKFIHIKVENALILQQPVALHAYFLKEGIIQERDRILIIDGGFRTVEMTDMKQNVILNHYEAELGCSKPLKNIKNIVQNHEGESNQLHINDMPNILEKGYECREENHETSQVHTLIQKELDAHFQDVMRVLQEQFKLEQYNTIIWTGGIVDLHKKRIEKMQSEISSFRMVDASKEAALHGYYIIGSQVFEDITNQSAYESKL

SEQ ID NO: 335 - protein, 388 aa, Bacillus cereus Rock3-29; identical to SEQ ID NO: 8

SEQ ID NO: 336 - protein, 341 aa, Bacillus cereus Rock3-29
MRSLYAIDVGIGFTKRAYRQDVDSEVTIKSEASTLAPVPNHAESEDLTKVSFIDLDFAYYMGNEAHQSDASFLPPFDEEIENYYESERFKQQIFGCIAKDYKENVVLPLVVTGLPVTCFGSQHEQLQRALKKETSVQIDGKFINITVENALILQQPVALHAYFLKEGIIQERDRILIIDGGFRTLEMTDMKQNVILNHYETELGCSKPLKNIKNIMQNHGGESNHLYINDMPKILEKRYECREENPQTKQVHTLIQKELDAHFQDVIRVLQEQFKLEQYDTIIWTGGIVDLHKKRIEKMQGEISSFRMVDASKEAALHGYYIIGSQVFEDITNQSAYESKL

SEQ ID NO: 337 - protein, 341 aa, Bacillus cereus Rock3-42
MKSLYAIDVGIGFTKRAYRQDKDSEVTIKSEASTLAPVPNHDESEDLTKVSFIDLDFAYYMGNEAHQSDASFLPPFEEEIENYYESEQFKQQIFGCIAKDYKENVVLPLVVTGLPVTYFGSQHEQLQRALKKETSVQIDGKFIHITVENALILQQPVALHAYFLKEGIIQERDRILIIDGGFRTLEMTDMKQNVILNHYETELGCSKPLKNIKNILQNHAGESNQLHINDMPNILEKGYGGREENPQASQVHTLIQKELDTHFQDVMCVLQEQFMLDQYDTIIWTGGIVDLHKKRIEKMQGEISSFRMVDASKEAALHGYYMIGSQVFDDITNQSVYESKL

SEQ ID NO: 338 - protein, 373 aa, Bacillus cereus Rock4-2; identical to SEQ ID NO: 9

SEQ ID NO: 339 - protein, 341 aa, Bacillus cereus Rock4-2
MKSLYAIDVGIGFTKRAYRQDVDSEVTIKSEAATLAPVPNHAESEDLTKVSFIDLDFAYYMGNEAHQSDASFLPPFDEEIENYYESEEFKQQIFGCIAKDYKENVVLPLVVTGLPVTCFGSQHEQLQRALKKETSVQIDGKFINITVENALILQQPIALHAYFLKEGIIQEQDRILIIDGGFRTLEMTDMKQNVILNHHETELGCSKPLKNIKNILQNHAGESNQLHINDMPKILEKGYGDKEENYETSQVDILIQKELDTHFQDIMRVLQEQFKLDQYDTIIWTGGIVDLHKKQIEKMQGEIVSFRMVDASKEAALHGYYIIGSQVFEDITNQSAYKSKL

SEQ ID NO: 340 - protein, 341 aa, Bacillus cereus Rock4-18
MKSLYAIDVGIGFTKRAYRQDVDSEVTIKSEASTLAPVPNHAESEDLTKVSFIDLDFAYYMGNEAHQSDASFLPPFDEEIENYYESERFKQQIFGCIAKDYKENVVLPLVVTGLPVTCFGSQHEQLQRALKKETSVQIDGKFINITVENVLILQQPVALHAYFLKEGIIQERDRILIIDGGFRTLEMTDMKQNLILNHYETELGCSKPLKNIKNIMQNHAGESNHLHINDMPKILEKGYGGREENPQTKQVDTLMQKELDVHFQDVMRVSQEQFKLEQYDTIIWTGGIVDLHKKRIEKMQGEISSFRMVDASKEAALHGYYIIGSQVFEDITNQSAYESKL

SEQ ID NO: 341 - protein, 341 aa, Bacillus cereus F65185
MKSLYAIDVGIGFTKRAYRQDVDSEVTIKSEAATLAPVPNHAESEDLTKVSFIDLDFAYYMGNEAHQSDASFLPPFDEEIENYYESEEFKQQIFGCIAKDYKENVVLPLVVTGLPVTCFGSQHEQLQRALKKETSVQIDGKFINITVENALILQQPIALHAYFLKEGIIQEQDRILIIDGGFRTLEMTDMKQNVILNHYETELGCSKPLKNIKNILQNHEGESNQLHINDMPKILEKGYGDKEENYETSQVDILIQKELDTHFQDIMRVLQEQFKLDQYDTIIWTGGIVDLHKKQIEKMQGEIVSFRMVDASKEAALHGYYIIGSQVFEDITNQSAYKSKL

SEQ ID NO: 342 - protein, 345 aa, Bacillus cereus AH676
MLLGNPYAIDLGNGFTKRASKKNKELEAAVITELSVLAEVDDYYNEASFTKIELTNIDSPYYIGEEARKSKLPLVRALGENKAKRYEDPIFKKLLFGFIAKDFKKSKHISLPLLVTGLPVSHFGNQRETLEKVITTETSMKVNGEMITVDVKKCLVIPQPVGTQYYLVKKNIIEKDDRILIIDGGFGTLDVTDMSGNSVIGRLGTELGCEKAFLNIEQIVRDNIGETPELSVSNMHYILENSYKYNGNSHNLYKDDKVSEKVESELKHHFASVLREVSQKFNFAVYDKIIWTGGMASLHKALIIEQQTKFPTFELLENGQEANLLGYYYLGDDVFDKITKEKAAN

SEQ ID NO: 343 - protein, 341 aa, Bacillus cereus AH676
MKSLYAIDVGIGFTKRAYRQDVDSEMTIKSEASTLAPVPNHAESEDLTKVSFIDLDFAYYMGNEAHQSDASFLPPFDEEIENYYESERFKQQIFGCIAKDYKENVVLPLVVTGLPVTCFGSQHEQLQRALKKETSVQIDGKFIHITVENALILQQPVALHAYFLKEGIIQERDRILIIDGGFRTVEMTDMKQNVILNHYEAELGCSKPLKNIKNMVQNHEGESNQLHINDMPNILEKGYECREENHEASQVHTLIQKELDAHFQDVMRVLQEQFKLEQYNTIIWTGGIVDLHKKRIEKMQSEISSFRMVDASKEAALHGYYIIGSQVFEDITNQSAYESKL

SEQ ID NO: 344 - protein, 343 aa, Bacillus cereus AH1271
MLLGNPYAIDLGNGFTKRASKKNKDLEAAVVTELSVLAPVDDYYNEAEFTKIELTNTDFPYYIGEEARKSKLPLVRALGENKAKRYEDPTFKKQLFGFIAKDFKKNVTIPLLVTGLPVSHFGNQRESLQKVAMEETAVKVNGELITIKVKQCLVIPQPVGTQYYLVKKEIIKKEDRILIIDGGFGTFDVTDMSGNAVIDRLGTELGCEKAFMTIEQIVRDNIGETPDLSVSNMHYILENGYKYNGSLYDLYTHKDVAEKVDAELQRHFDAALREVSQKFNLAVYDKIVWTGGMAALHKKRIEKKKEQFPTFAVLENGQEANLLGYYYLGCDVFDKLTKEKASN

SEQ ID NO: 345 - protein, 341 aa, Bacillus cereus AH1271
MKSLYAIDVGIGFTKRAYQQDVDSEVTIKSEASTLAPVPNHAESDDLTKVSFIDLDFAYYMGNEAHQSDAAFLPPFDEEIENYYESEQFKQQIFGCIAKDYKENVVLPLVVTGLPVTCFGSQHEQLQRALKKETSVQIDGKFIHITVENALILQQPVALHAYFLKEGIIQERDRILIIDGGFRTLEITDMKQNVILNHYETELGCSKPLKNIKDILQNHAGESNQLHINDMPNILEKGYGGREENHQTSQVDTLIQKELDAHFQDVMRVLQEQFKLDQYDTIIWTGGIVDIHKKRIEKMQGEISSFRMVDASKEAALHGYYMIGNQVFDDITNQSAYESKL

SEQ ID NO: 346 - protein, 389 aa, Bacillus cereus AH1271
MSILLKAGADAGNNGLKLMVKGQDPIFIPSIYSLYIGEPTGLLDEGDVSLSELENHIDVTISSPSLMLNNVRYIVGEKVIQDQLKGTEVEKKSNKSTDELMVITILSGLAVSAMRQSPTSSHINIRYDLSVALPMQLITQEIAAGNAKRYMGNHKVVFHYPNGRDVTINISIEYCKCLPEGASGTWGIVYDEEGNVVKHKIECEQNQVSEIDFVDKTLLSFDIGAGTTEEVVSLGVNFRPQLSKGLSYGVKETLLQIITRWNRKYPTKTIDSITEFNQIYLHEKHPRNALLVEESQPALLGLAARVATDIINKIDDMKDDPYVFIYGGGAVIIKNSLKMILKQKGRLTNVIFVDNPLFTNARGLLVYTCSPKYREHKQKELGFTNLTIS

SEQ ID NO: 347 - protein, 407 aa, Bacillus mycoides Rock1-4; identical to SEQ ID NO: 10

SEQ ID NO: 348 - protein, 396 aa, Bacillus pseudomycoides DSM 12442
MKLNYFVEDDNGNSEKKITINGEMMKFPNTYSYVYKDPVPQDKKIEELVHGLIRNMDVTVNSSALKGQVAQRIFVGERAIRSGADLQNLNIRSNRGKHKQDTTIMTTVSAIACRAVQDMFNKENSLEEGTNVEVNVLMVTALPASEWTKEKAKQLSDRFTNSSHHVTVTVGDVRIYVTLKFDKVIVVQEGTVALFALIEDGKGNYRDDDLFNEFKEMYNLKNITGEYFQEKRLLHIDIGDGTTEYVVTKGYDYDNDHSSGERHGIGHAIERAKKDFEDEWGFSVERQEFAGYLKEVHPKYYDDAKKFLARAKFNLADEVLDTAETKLQDLKYDVDVVCVYGGGSIQLKENLFEELKEICDSKKIKILWINPKNATEMNVKGMTVFSSIALQTEQVN

SEQ ID NO: 349 - protein, 407 aa, Bacillus pseudomycoides DSM 12442; identical to SEQ ID NO: 11

SEQ ID NO: 350 - protein, 341 aa, Bacillus thuringiensis serovar tochigiensis BGSC 1
MKSLYAIDVGIGFTKRAYRQDVDSEVTIKSEASTLAPVPNHAESEDLTKVSFIDLDFAYYMGNEAHQSDASFLPPFDEEIEHYYESEQFKQQIFGCIAKDYKENVVLPLVVTGLPVTCFGSQHEQLQRALKKETSVQIDGKFITITVENALILQQPVALHAYFLKEGIIQERDRILIIDGGFRTLEMTDMKQNVILNHYETELGCSKPLKNIKNIVQNHAGESNQMHINDMPNILEKGYGGREEDPQTSQVDTLIQKELDAHFQDVMRVLQEQFKLEQYDTIIWTGGIVDLHKKRIEKIQGEISSFRMVDASKEAALHGYYMIGSQVFDDITNQSVYESKL

SEQ ID NO: 351 - protein, 423 aa, Bacillus thuringiensis serovar berliner ATCC 1079]
MVEQMLSKNMLLGGFDTGNIKAKISFLNEKGNIESFAIPTVIAEAPPAKIDLKSAPSKKNDYVNEKDEDIELLHVRIISNSLDGDARSRAWYVGAYAKDQEDRQEPTVDEMGKTEDKFSQKNKKLHLIPLFTSMAVAAARIGKEEVFVPFSGGMPIEDYKLRGEEQILEMLYGEHTVEFLDGTYEGKKIKITINDGTMNVEGVSSVLAILFDIVNGEIVEVEGMDAEIGESYAINDLGAGTSDNAFFEDGELNKKLSTNTDLGTNKYIDEILKNIKERFMENEILKSFMTDEIESPFKTREDFIQRLVMPEVEKMIEDDTYKPTFSVKWGPVKENVTDIVMDGMLKYAEDQKASLMKFWFKTNADKNIVVGGGVLFGYAGLRDLKEQDGFILPKNIQESAYFTSRSYLIANLLEQLNKEGVEA

SEQ ID NO: 352 - protein, 341 aa, Bacillus thuringiensis serovar berliner ATCC 10792
MKSLYAIDVGIGFTKRAYRQAVDSEMTIKSEASTLAPVPNHAESEDLTKVSFIDLDFAYYMGNEAHQSDASFLPPFDDEIENYYESERFKQQIFGCIAKDYKENVVLPLVVTGIPITCFGSQHEQLQRALKKETSVQIDGKFIHITVENALILQQPVALHAYFLKEGIIQERDRILIIDGGFRTLEMTDMKQNLILNHYETELGCSKPLKNIKNIVQNYEGESNQLHINDMPNILEKGYECREENHETSQVHTLIQKELDAHFQDVIRVLQEQFTLEQYDTIIWTGGIVELHKKRIEKMQSEISSFRMVDASKEAALHGYYIIGSQVFDDITNQSAYESKL

SEQ ID NO: 353 - protein, 327 aa, Bacillus thuringiensis serovar berliner ATCC 10792
MDLMEIKTYSIDLGNGYTKRIVNGECIVEPSVIADVESYFSDDVDVTTLQLSEGEAYFTGDDVGILGLKPISALGEHDMDRYETPEFKKMIFGFLAKDFKQDVTIERLVTGLPVQHFKTKGKIVEELLKGRTVVKVNDKDIIIDIKNVSIIPQPIGTYLHLVAKKAVTPNKDLTLIVDCGHGTLDVTELKGKTIVKRAGNNEGAKEAYINIYNTLVEEYGSLKELTISNIQNILLDGLLVSGSRINVRAKSEVQKILKKHFNSIFTFLQDNKFDLRSYDKVVFTGGIVHLYHDYFGERAEANFLVVEDGQTANARGYHEYGKAMTKK

SEQ ID NO: 354 - protein, 315 aa, Bacillus thuringiensis serovar sotto str. T04001
MGNGYTKRIVNGECIVEPSVIADVESYFSDDVDVTTLQLSEGEAYFTGDDVGILGLKPISALGEHDMDRYETPEFKKMIFGFLAKDFKQDVTIERLVTGLPVQHFKTKGKIVEELLKGRTVVKVNDKDIIIDIKNVSIIPQPIGTYLHLVAKKAVTPNKDLTLIVDCGHGTLDVTELKGKTIVKRAGNNEGAKEAYINIYNTLVEEYGSLKELTISNIQNILLDGLLVSGSRINVRAKSEVQKILKKHFNSIFTFLQDNKFDLRSYDKVVFTGGIVHLYHDYFGERAEANFLVVEDGQTANARGYHEYGKAMTKK

SEQ ID NO: 355 - protein, 423 aa, Bacillus thuringiensis serovar sotto str. T04001
MVEQMLSNNMLLGGFDTGNIKAKISFLNEKGNIESFSVPTVIAEAPPAKIDLKSAPSKKNDYVNEKDEDIELLHVRIISNSLDGDARSRAWYVGAYAKDQEDRHEPTVDEMGKTEDKFSQKNKKLHLIPLFTSMAVAAARIGKEEVSVPFSGGMPIEDYKLRGEEQILEMLYGEHTVEFLDGTYEGKKITITINDGTMNVEGVSSVLALLFDIVNGEIVEVEGMDAEIGESYAINDLGAGTSDNAFFEDGELNKKLSTNTDLGTNKYIDEILKNIKERFMENKILKSFMTDEIESPFKTREDFIQRLVMPEVEKMIEDDTYKPTFSVKWGPVKENVTDIVMDGMLKYAEDQKASLMKFWFKTNADKNIVVGGGVLFGYAGLRDLKEQDGFILPKNIQESAYFTSRSYLIANLLEQLNKEGVEV

SEQ ID NO: 356 - protein, 281 aa, Bacillus thuringiensis serovar sotto str. T04001
MGNEAHQSDASLLPPFNEEIENYYESERFKQQIFGCIAKDYKENVVLPLVVTGLPVTCFGSQHEQLQHALKKETSVQIDGKFINITVENALILQQPVALHAYFLKEGIIQEQDRILIIDGGFRTLEMADMKQNLILNHYETELGCSKPLKNIKNILQNHAGESNQLHINDMPKVLEKGYECREENHETSQVHTLIQKELDAHFQDVIRVLQEQFTLEQYDTIIWTGGIVDLHKKRIEKMQSEISSFRMVDASKEAALHGYYIIGSQVFDDITNQSAYESKL

SEQ ID NO: 357 - protein, 338 aa, Bacillus thuringiensis serovar pakistani str. T131
MKSPYAIDLGIGFTKRAYRKHVNSPTTIKSEASTLAPVPIEDESENLTKVSFMDVDFAYYMGEEAHQSEASFLPPFEEDIEHYYESNRFKQQLFGCIAKDYQENIVLPLVVTGLSLSCFGKQHEQLQKIIKKETSVQLDGKFITITVENALLLPQPIALHAYFVEESIIQERERVLIIDGGFRTLEITDMKQQLILNRYETELGCRKPLKKIENILREHVGESPTLHLHNLPDILDKGYICKEEIHCLQTSPISALVQKELNAHFQEILDVVQEQFLFHQYDKIIWTGGVVDMHKKRIQEKQGAYPSIHILEPAKEAALHGYYILGCRVFEDIVQQPV

SEQ ID NO: 358 - protein, 384 aa, Bacillus thuringiensis serovar pakistani str. T131; identical to SEQ ID NO: 12

SEQ ID NO: 359 - protein, 407 aa, Bacillus thuringiensis serovar pakistani str. T131
MMRTVADIGNSELKMVINGGKVIKLPDVNKRVFGRVTNKEGSLKQSVTNLMNEICVHVTSDAIERDGKFYVGYRAAHSNGKPDALDIELGDKYKRDIPVVNVLSVMATKAVQTIYEEVGELPKSIEVPASLILAIPASEYEGKKARFLESRFKENVHIVIVYVGEEKVTVQIKFETVKVTREGIPALYAIFEGNQDMFDDFNKLYKKETDSKEDDKEVKKRKANLMVEEEVNGEYFKNKKILHADIGDGTSEYIFSKGLNPVPDACWGEKRGIGHAIEGAIKLLQEEYEGGVDINRQQFSELVTDPNDKKHDKAVEFLEETRYMQAQGIYDDIEKAYVYKTASQAEVLAVYGGGSIALKEDLYKKAFEFCEVNDMQLLWISPTYATEMNVRGMEILSKKLASRVAKK

SEQ ID NO: 360 - protein, 341 aa, Bacillus thuringiensis serovar pakistani str. T131
MKSLYAIDVGIGFTKRAYRQDVDSEMTIKSEASTLAPVPNHAESEDLTKVSFIDLDFAYYMGNEAHQSDASFLPPFDEEIENYYESERFKQQIFGCIAKDYKENVVLPLVVTGLPVTCFGSQHEQLQRALKKETSVQIDGKFIHITVENALILQQPVALHAYFLKEGIIQERDRILIIDGGFRTVEMTDMKQNVILNHYEAELGCSKPLKNIKNIVQNHEGESNQLHINDMPNILEKGYECREENPETSQVHTLIQKELDAHFQDVMRVLQEQFKLEQYNTIIWTGGIVDLHKKRIEKMQSEISSFRMVDASKEAALHGYYIIGSQVFEDITNQSAYESKL

SEQ ID NO: 361 - protein, 341 aa, Bacillus thuringiensis serovar kurstaki str. T03a1
MKSLYAIDVGIGFTKRAYRQDVDSEVTIKSEAATLAPVPNHAESEDLTKVSFIDLDFAYYMGNEAHQSDASFLPPFDEEIENYYESEQFKQQIFGCIAKDYKENVVLPLVVTGLPVTCFGSQHEQLQRALKKETSVQIDGKFINITVENALILQQPIALHAYFLKEGIIQEQDRILIIDGGFRTLEMTDMKQNVILNHYETELGCSKPLKNIKNILQNHAGESNQLHINDMPKILEKGYGDKEENYETSQVDILIQKELDTHFQDIMRVLQEQFKLDQYDTIIWTGGVVDLHKKQIEKMQGEIVSFRMVDASKEAALHGYYIIGSQVFEDITNQSAYKSKL

SEQ ID NO: 362 - protein, 370 aa, Bacillus thuringiensis serovar monterrey BGSC 4AJ1
MKMLITAAIDAGNDALKALFNGFENKLYIPNVVKEMESRQVIELGDDPLKELHVHITSSALKKSATYAVGTLAAKEKQSAQIPATDLKSESDQTTILMLTALAYEAASNSDKDVIDAEFLLSTGLPVDEVKEDKRAGFKKKLLEGTHVVEFKKTPHLEGKKVRISFKDIFVNVEGFAAMINLTISEELKSQNSELRQKNILINDMGGNTTDKAVIRMGQIDNEYSSGSPLGIGEYLDAIRKEVFNTYRVDVFKSRRQLVENMTAKHEAYIIRPHGKPVSYYEIAEKHLKEFTVREYADLVDKWKEVGDLHSIHNVGGSAAIVKSFLEDINKNENQFEMHFLDTEESIWSIAKAYYKLLLVIAKQKELSLN

SEQ ID NO: 363 - protein, 365 aa, Bacillus thuringiensis serovar monterrey BGSC 4AJ1
MDAGNDALKAFIGGLGEDHKVYIPNVIKKMDDRPILSLGDDPLSELHLRITSSAINISGTYAVGTLAVKEKDSSHIPATVLKSESDQTVILTLTALAYYAAMHSKAKKVDVEYLLSSGLPVDEVKADKRAAFKEKLIEGTHVIEFKKTPLLEGKTVNIKFRDAFMNVEGFGAVINLTVDDKLQAINNELKQKNILINDMGGNTTDKAVIRMGRIDNEYSSGSPLGIGEYLDAIKKEVFTTFRVDVFKSRRQLVENMTAEKEAFIIRPHGKAESYQAIAEKHLMEFAMREYADLVDKWKEVGDLHSIYNVGGSAAIAKPFLEQINKENNQFEMHFLDTEESIWSIAKAYYKLLLIIAKQKGLDLKK

SEQ ID NO: 364 - protein, 388 aa, Bacillus thuringiensis serovar andalousiensis BGS1; identical to SEQ ID NO: 13

SEQ ID NO: 365 - protein, 341 aa, Bacillus thuringiensis serovar andalousiensis BGS1
MKSLYAIDVGIGFTKRAYRQDEDSEVTVKSEASTLAPVPNHDESEDLTKVSFIDLDFAYYMGNEAHQSDASFLPPFEEEIENYYESEQFKQQIFGCIAKDYKENVVLPLVVTGLPVTYFGSQHEQLQRALKKETSVQIDGKFIHITVENALILQQPVALHAYFLKEGIIQERDRILIIDGGFRTLEMTDMKQNVILNHYETELGCSKPLKNIKNIVQNHTGESSHLHINDMPNILEKGYGGREENPQASQVGTLIQKELDTHFQDVMCVLQEQFMLDQYDTIIWTGGIVDLHKKRIEKMQGEISSFRMVDASKEAALHGYYMIGSQVFDDITNQSVYESKL

SEQ ID NO: 366 - protein, 429 aa, Bacillus thuringiensis IBL 4222
MEKAQLILDLGNSETRGVLRVGEIINKTRIEHNFYLSNYFSPIFEGVGGIPESDDYTEENSTVFTLDDDFKIGNGVVNRDTYVNGLMCSNEFSDTQDKPTAMTKKYDSSYTVLTIITAIKQSAIWMKDYFGKKGKNFSVQQLINEVAWELTILLPPSQEKAGGLVLQETLVGQIPVKFELPKADARINITKVTIRAEGMMAYTGVLLSKTRRQPRPNKIFMQKAKVMVLDIGAGTTDLIVIDQGKAIERSKYTIDLGGNNITQTLRTTVQTNLEIRLSAQVFEQGVITGKVKQGLKEHDVTDELIGAKRSVAAKISKEVKDYLESSGIEANSIEYILVVGGGSIPSENDKVKPISDYLLDSIKRFAPQVGLVDISDIITKPNSVAFENVADADFVSSRELNISGAGTVTDLLEIKQYLAQQEQAKQVQA

SEQ ID NO: 367 - protein, 336 aa, Bacillus thuringiensis serovar huazhongensis BGSC1
MTKVFAIDHGNGAVKMRTDVFKKTLPAIYSFSSNVGEALSGGKMKLKTYKVEGTEYVWGDDIIKVNNTLNTYAQQNRYKTNQYKTLSKIALAEMAAKTNVKSYDEILVVTGVPSQEIGTKAVDEIKEVYQGTHELEVNGKKVTLNVVDVIVLAQPVGTVMSRYLDEDGFVADDSYEDMTVGIIDIGTGTTDLDVISMLRREKESTSVPKGMHDVYEPIVAKIKKETSATINDYKLEKVFEEGAYQASKRMDPIDFNDEKTASIKEVYDFIVNGVNNAWKTFDRFDEVLVSGGGANTFHELLEEWIGKVTKLEESQTANVEGFYRYGKFEVGEEDGE

SEQ ID NO: 368 - protein, 341 aa, Bacillus thuringiensis serovar huazhongensis BGSC1
MKSLYAIDVGIGFTKRAYRQDVDSEMTIKSEASTLAPVPNHAESEDLTKVSFIDLDFAYYMGNEAHQSDASFLPPFDEEIENYYESERFKQQIFGCIAKDYKENVVLPLVVTGLPITCFGSQQEQLQRALKKETSVQIDGKFINITVENALILQQPVALHAYFLKEGIIQERDRILIIDGGFRTLEMTDMKQNLILNHYETELGCSKPLKNIKNIVQNHTDESNQLHINDMPNILEKGYECREENHETSQVHTLIQKELDAHFQDVMRVLQEQFKLEQYDTIIWTGGIVDLHKKRIEKMQGEISSFRMVDASKEAALHGYYIIGSQVFEDITNQSAYESKL

SEQ ID NO: 369 - protein, 341 aa, Bacillus thuringiensis serovar pulsiensis BGSC 4
MKSLYAIDVGIGFTKRAYRQDEDSEVTVKSEASTLAPVPNHDESEDLTKVSFIDLDFAYYMGNEAHQSDASFLPPFEEEIENYYESEQFKQQIFGCIAKDYKENVVLPLVVTGLPVTYFGSQHEQLQRALKKETSVQIDGKFIHITVENALILQQPVALHAYFLKEGIIQERDRILIIDGGFRTLEMTDMKQNVILNHYETELGCSKPLKNIKNIVHNHAGESDHLHINDMPNILEKGYGGREEDPQTNQVHILIQKELDAHFQDVMRVLQEQFKLDQYDTIIWTGGIVDLHKKRIEKMQGEISSFRMVDASKEAALHGYYMIGSQVFDDITNQSVYESKL

SEQ ID NO: 370 - protein, 341 aa, Bacillus thuringiensis IBL 200
MKSLYAIDVGIGFTKRAYRQDIDSEMTIKSEASTLAPVPNHTDSEDLTKVSFIDLDFAYYMGNEAHQSDASLLPPFDEEIENYYESERFKQQIFGCIAKDYKENVVLPLVVTGLPVTCFGSQHEQLQHALKKETSVQIDGKFINIKVKNALILQQPVALHAYFLKEGIIQEQDRILIIDGGFRTLEMADMKQNLILNHYETELGCSKPLKNIKNILQNHAGESNQLHINDMPNILEKGYECREENHETSQVHTLIQKELDAHFQDVMRVLQEQFKLEQYDTIIWTGGIVDLHKKRIEKMQGEISSFRMVDASKEAALHGYYIIGSQVFDDITNQSAYESKL

SEQ ID NO: 371 - protein, 384 aa, Bacillus thuringiensis IBL 4222; identical to SEQ ID NO: 14

SEQ ID NO: 372 - protein, 350 aa, Clostridium botulinum Ba4 str. 657
MNKYTIAIDLGYGQIKGINQDNKRVIFPSIISSGKDRSLDTFFNSIDNIVDNIHVKILDEYFNEKEYFVGELAKRQPSNSSFINRDNKINSEENKVLLATALGLLIPNDLSNDTKIHIVTGLPLEHFIKQKQALNDMLKDFEHTIKFVDHNFSRNIKFEESNITLFPQGAGAIFSKINNDISSLLIKETFIGLIDVGFKTTDIVVFRINKDKEPVFEQEMSATLDGLGMINIYNTMDKAFTDNSRDGSKLNTEQLMLLCEEGKIFFKGDYIDLKKDLIKARKTLSTNIINKADGLWGSRKNSFNSIMIAGGGGKVLYNHLKLIEPNMCQLIDNPEFANAIGYLEFGKQFK

SEQ ID NO: 373 - protein, 392 aa, Bacillus coagulans 36D1
MGKTRIAAVDVGNDSLKGIFGKMEYELNIPNVIARDIEDRPVIGIEELDSKDPLEGIHVKVHSPALKENNVIYRVGDLATKSDNATELDPGSSKSEEDQTLVLLFTSLALDAVREENAKVFTRNQNVIDANYTLGTGLPLREVKEGKDAGYRSQLLGSVHQVEFLVTPKYQGLKVNLKFDEIKVYPEGFAAFINLVMDNDLNIINRELIDKRILIQDIGGLSTDIAVIKNRTVDDDRAQGFNLGVSEALEQIREEIRVKYGVELDSRRDVVDIITKKHDRNHIMVKGSRTSVHDITDRILFDLAKKQYRLLRNVWQKNSQTEICYFVGGGSVVLKDYLKTLNNSLDGYNIDFFEDEKESIWMMANAYYKLISDYVRKNNKPEDKGKKPVESK

SEQ ID NO: 374 - protein, 331 aa, Vibrio cholerae RC9
MEDFMSQFVLGLDIGYSNLKMAMGYKGEEARTVVMPVGAGPLELMPQQLTGGAGTCIQVVIDGEKWVAGVEPDRLQGWERELHGDYPSTNPYKALFYAALLMSEQKEIDVLVTGLPVSQYMDVERREALKSRLEGEHQITPKRSVAVKSVVVVPQPAGAYMDVVSSTKDEDLLEIIQGGKTVVIDPGFFSVDWVALEEGEVRYHSSGTSLKAMSVLLQETDRLIQEDHGGAPGIEKIEKAIRAGKAEIFLYGEKVSIKDYFKKASTKVAQNALIPMRKSMREDGMDADVVLLAGGGAEAYQDAAKELFPKSRIVLPNESVASNARGFWFCG

SEQ ID NO: 375 - protein, 290 aa, Clostridium butyricum E4 str. BoNT E BL5262
MITVVDLGNYNVKAMNSLTAKSIFKSNISRDYESYPDAFKHIKIDGEYTYFEKGPFSMEYIKTKKDYTAQLMYAIASLNEAEDEIKTNLTLLLPISEIQEKHKYIDEIKGKTFNCSVKLKTKINKNITIEDVMVLPEGYVIYFKLGEKYKTSSIVIVDIGGRTTNLVAMVNGEPKVLKTLKIGALDFYAKIRELHADKEYNLEDIERLIKEGKVVVTDKQIAQFANDILNQIKQHIKLEHYEHVLFAGGGAIIIEKIIKDILPDNCEIVDEPLESNMEGAMEASKMAWNE

SEQ ID NO: 376 - protein, 302 aa, Helicobacter pullorum MIT 98-5489
MQKIAIDLGYGDTKVMANGKLFKFPSAISQVRQSLIQAEKKDTFLFNGIEYEVGSKALRNAVATRGYLFLQKYSPLLIFNALLEAQFDLKKPIEIATGLSLVNQSEAQDFLKHIESFVVNDIQIKPQISLFAQGQGIYNEANIQSNGLVCVIDIGYNTFDFLVFENNQPKVELCFANKMGANLAIVDLQKLLIKEFKVDFSEQEAKEVFLKKEVRIAGKSIDFADIVNSAIQNYTNFIFDELFSKSGDTLKKAEAVIIGGGGAYFLTKEHLEQVHNANYVFSDNPEFANVRGYYKGSFSNKE

SEQ ID NO: 377 - protein, 347 aa, Methylobacterium extorquens AM1
MAEAAMKKERGAKEGVQPLVAIDDGYAQTKLYGEGLDGRIVKRVLRSSVRIGSHGLGSFAGDGAIGLWQTEEGNKYTVSDEIEAEDPRFTDFHLSPINRVLVNHALSAAGFGGAKVDIVTGLPVKEFFKEQRKDEERIQRKRENLQRGAFSRSAGVEAPVLADIQVGCQAIAAFVDWALDDEMKTRNDIAKTIAIVDIGGRTTDVAVVVGGKSIDHGRSGTADVGVLDVYKGVLDRVKGRFELDDDSLPLSLMNEAVRTGSMQLFGKPHDVSEIVSDVVGQVQERALREIQRRLGRAATLQAVVFVGGGSALFKDIASAYPNGVMSDDPEFANARGLYKYFASRRRS

SEQ ID NO: 378 - protein, 343 aa, Acidovorax delafieldii 2AN
MELIVRAVDVGSGNTKLVTGVAGADIRCASFPSVAYPSSGETPQWPASERRKTFCIPVGPLFYEVGPDVGLAADTFRAKQLHDEYTESPEYMALLRGALSMMKVPHIDLLIVGLPVALFTLKKAALEKAMVGSHQVGGGKTVTVAKAMAVAQPQGALVHYAAEHQKIESIGTEQSLVIDPGSRTFDWLVTRGMRLVQKQSHSINRGMSDVLRLLAAEVSKDLGTPYRDYDAIDLALRTGKAPVIFQKPYDMKRHLPLAESVAQQAVSTMRQWIETPESLQNIILVGGGAFLFKKAVKAAFPKHRIHEVKEPMFANVRGFQLAGQNYAASTMAPGRDRGAGEAA

SEQ ID NO: 379 - protein, 259 aa, Acidovorax delafieldii 2AN
MWERSLHADYTGTDSYKALFHAGLLLTSATEIDVLVTGLPVSQYQDESRRKALEKQFTGKRKITPKRTVEAASVKVVAQPIGGLFDMVNQDESQGEDGDIDEEARILVVDPGFFSLDWVLVSNGEFHRQSSDTSLKASSVLLEQAGLLIAQDYGAKPTVEALENAVRAGITSILMMGQRVDFGPYLKRAGESMSSTIANSIQKSLRNEKMSPDIVVLTGGGADFFRDIIQDAFPRLKVVSPKESVLSNARGFWLLGSIN

SEQ ID NO: 380 - protein, 295 aa, Clostridium cellulovorans 743B
MIMGIDVGYSHTKVYTSNGRDIFRSTVTNGIMDINVNAIKVKIAGNEYTVGENTGNFSVKLNKIDDAVFRLCLYTAVARNLPIGEDEVQLVIGLPVQYYKDQKLELKKALEGIQVFLSLNDKPIRFKITKCVVFPQSAGVFVLHPDIFEGSNIVIDIGGMTVDVSYFNDMTLQDYRTYELGMIKLYDKLVQNIKAEFGVSYDILNAEDIIKNKRIFRDGELIDCTDVVNTTLRTHASLIINRVMAGLSQYDTSQRHFIGGGSYILGEYLPVKAIKEDIYANAEAFFKIGVERFAS

SEQ ID NO: 381 - protein, 288 aa, Clostridium cellulovorans 743B
MILGIDIGNYSVKTSTGVNFKSLVSTEENLLGSKIKIEFDNKTFYIGEGNRDTELDKASKESFLPLLYSAIALSSPAQYNKVVVGLPINQYKSRKAEIENKISKESNKKIILNDKERTLTITEFKVYPEGVGAYQSLDSEEDMIIIDIGGRTTDIAYIFNGELKTTSTVNVGTLNIYKNIADQLNSKFSIDIDVEKAEKIIKQGYLSIDNKTVDISFVSSVLRENFMKIKADLDFKFSAHTEKLMLTGGGAALFHKAFVNRYEDISIMQNPVLANVRGFKKVGELLWV

SEQ ID NO: 382 - protein, 327 aa, Aeromonas hydrophila
MSQFVLGLDIGYSNLKMAMGHKGGEARTVIMPVGAGPLELMPQQLTGGAGTSIQVVIDGEKWVAGVEPDRLQGWERELHGDYPSTNPYKALFYAALLMSEQKEIDVLVTGLPVSQYMEVERREALKARLEGEHQITPKRSVAVKSVVVVPQPAGAYMDVVSSTKDEDLLEIIQGGKTVVIDPGFFSVDWVALEEGEVRYHSSGTSLKAMSVLLQETDRLIQEDHGGAPGIEKIEKAIRAGKGEIFLYGEKVSIKDYFKKASTKVAQNALIPMRKSMREDGMDADVVLLAGGGAEAYQDAARELFPKSRIVLPEESVASNARGFWFCG

SEQ ID NO: 383 - protein, 295 aa, Clostridium botulinum E1 str. 'BoNT E Beluga'
MLIGVDLGNFGVNTSENDFFYSRISDISNFSEENKITYEGIDLYIGDGEFSTNWNKSQKENTMPLLFSALARSSNENFFQIVLGLPIQQYKSNKDEFKKYIEDNRGKTIIYKGIKREIIISDVLIAPEGAAAYYNLSAEQKKLIGNKSLIIVDIGGRTTDVCMFQNKEIKKFKTIPTGMLNIYADIVTEVNNRFTESFKLEEGENILKEGLFLYGEKQDINFVKPILQRHFNSIYKDLQLNFELSKGYVLLTGGGSLILKRPFENRLKNLIISKDPVFDNAKGFKKLGTSIWQEK

SEQ ID NO: 384 - protein, 305 aa, Clostridium botulinum E1 str. 'BoNT E Beluga'
MSEKIKVLVSIVDLGNYNVKGINQDGKKIDFKSNISKNYETFPDGFNYVLLDGEYTYFEKGVFSKEYIKTNKDYTAQVLYAITKLHEDIEDIETNLTLLLPISEMEHKQKYIDELKGKTFEYTVKASKKMEKTVKINDVLVIPEGYASYFTLEDEVKTSAVLLIDVGGRTSNVVAMNNGKPQVLTTYKIGVLNFYSKLKKLNEDKEYNLEDIERLIKKGDITITQKQLATFTNDIINEIKIDVNLNHYDNVVWTGGGSTVIEKVITENLPESCSLNKEPLYSNINGALEVSKITWGIKDGKEEKK

SEQ ID NO: 385 - protein, 298 aa, Clostridium botulinum E1 str. 'BoNT E Beluga'
MENNNGLVRITVVDAGNYNMKYMGKGEMGSFSSKVSTDEQPFNDAYDRIEIDGKITYIGQFGELSREYNKVDRNLLPQILFAICKANNDVDTITTNITTMLPILQMTNKSKIIEQLKSQNPFKVKVNGKDKTIFIKQVAVLPESFTSFYDMTKEQQKEDVCIVDCGSRTVNVCTFINNGKLEKTATLKLGSLDFFKKVKSIEASKGKDYVEEDIERLINNGKITVAEKQYKDFFNEILNSIKADVNIDNYATYFTGGTAKMFQKYIPNGCKLFVNPLYSNLNGALKASELKWGKVVNG

SEQ ID NO: 386 - protein, 347 aa, Leptospirillum ferrodiazotrophum
MKKAGQNKETLKIENIGLDDGYANIKLAWKDEDGTIRTKKVPSRAKAGSLGVGSLLDDGPGAAMGYETEGERWTVAPGIEGESTRFPDYNLSSLARVLAHHALVSAGWGGKDVGIATGLPLDRYFRDGKRDDVRIARKIENFSKDVIRLDGGATARIVGHEVFAQGLAAVVDWLVDDSDPREQIGPIGVVDIGGQTTDISVVSPGFQVDRGRVRTVDLGVLDVRDLLRRRLQSRFDVYEISDGAIDAALAFGKIRVWNKEVDVIDDTAQVVREVESSLERNILSEFGKAASSFETILFVGGGSRIFRSLPARFPNAVVGPDPEFANARGLLKIRILNERLNKRGSRS

SEQ ID NO: 387 - protein, 324 aa, Gallionella ferruginea ES-2
MLTVGLDIGYSNLKIVYGDNTEVSPKMIKRPAGAAPLDHLGQRIMGSDDSLHVLVDGKEFAAAVSHDRIENWPRELHKDYTATESYRALFNAGLLLTEMSEIDCVVTGLPTNQYLDAGLREHLTKIMRGEHQITPRRKVVVHEVKIVPQPLGGFVDWMHGLNDPSQIEDSSVLVVDPGFFSVDWVLLVNGEFKRASSGTSLDATSVVLDEAAALIAKDHGGNPGRSKLENAVRAERSTVSVFGERIEIAPYLADASAKVGHIACSQIQESLRKENSSIDQIVLVGGGAPFFEASIKEAFAKTPINLAKEAVFANARGFWRGGAA

SEQ ID NO: 388 - protein, 378 aa, Paenibacillus sp. oral taxon 786 str. D14
MIGNVLFPRCEEVIMIRIAGIDVGNDSVKVVVDGSQRPIIIPSIVSPGYDRHVLQEEDSPLKALDVRVYSPKLKRNNQRYFVGLLAMEDQDNSELEETDNKATSDQSLVVALTALAYAALAGQTYPTTGTGIEEVEYILGTGLPVRTYVAFHKAFEERLTGEHEVTFLSTPELRGRTVRINIRRTIVSVEGAAALFHLATNDTLQVRNEELHNGCIGICEIGALTTDFPVVKRMNIDNQFSTGEQFGLATYLDSIIRDVEDQFGYRFPSRTKLIGRIRNREFIIQRVGEGQADIRPIVDMYFSRAAQKLVDLIRKRWKKYPDIECFYVLGGGAAALKSYLIEAAGPMRLRFEENSEILNVQGYLKLAKNKAGQQPNPA

SEQ ID NO: 389 - protein, 348 aa, Clostridium botulinum D str. 1873
MSKGNNIVDSFAVQVIDDGYADTKSRSENTNIIVTPSYVTSWRPSYNKDNDLKEGKVDKLSRIEVNVNGSKFLVGECAVKQDRNIQWNGASDKHDDTSFDILLKTHLSLLNKKPMSRVKLVMGLPVIASLDKERVDKMKAKVLRQHDVAMRLCGDKEFQNKIIKVEDLIIKAQPHGTLCDLILDNSGNLTNKDLAKKVNAISDIGGKTHNLYLVDALEPLADFCDTKNSGMYLAYMWIKNYIEQELHLSISDGQIQYIVASGHIKGYDLTPVIQKAYRSLARKIILEIRTVWENAFPFIENIIFTGGGATVLKPYLQEEFKNAMYLTRNQNAAGLFKQGIRKWKRKAV

SEQ ID NO: 390 - protein, 341 aa, Bacillus anthracis str. A1055
MKSLYAIDVGIGFTKRAYRQDEDSEVTVKSEASTLAPVPNHDESEDLTKVSFIDLDFAYYMGNEAHQSDASFLPPFEEEIENYYESEQFKQQIFGCIAKDYKENVVLPLVVTGLPVTYFGSQHEQLQRALKKETSVQIDGKFIHITVENALILQQPVALHAYFLKEGIIQERDRILIIDGGFRTLEMTDMKQNVILNHYETELGCSKPLKNIKNIVQNHAGESDHLHINDMPNILEKGYGGREEDPQTNQVHILIQKELDAHFQDVMRVLQEQFKLDQYDTIIWTGGIVDLHKKRIEKMQGEISSFRMVDASKEAALHGYYMIGSQVFDDITNQSVYESKL

SEQ ID NO: 391 - protein, 340 aa, Thermoanaerobacterium thermosaccharolyticum DSM 51
MFKIGLDLGYGYTKGINESDKTVVFPSIVGNAYERNLKGLFESSFEKRIDNMHIVIMNGERHEFFVGELARREGRNVSYAFDENKINHPNTKALIAASCLLLFPEDGSPVHLVTGLPLEQYIHKKDEFLEMLKGYRNLGCFKGDEKVKTIKFDKVTIFPQAAGAVYSAIMEDLHRYLIKGSYLGLVDIGFKTTDFIVFLVEDRLILREDLSGTIDVGISSIYNSIDKLFIQKTGSKLDVPELMRLAKDERIFFRGRQIDFGDEIKSIKAEIARVIKDRLKAVWGNKLDFFNTIFLAGGGAKDLQEFLVDIYDNAVIVKDPQMANAKGFLKVAELEEKKNN

SEQ ID NO: 392 - protein, 391 aa, Bacillus subtilis; identical to SEQ ID NO: 1

SEQ ID NO: 393 - protein, 327 aa, Vibrio mimicus VM603
MSQFVLGLDIGYSNLKMAMGHKGEEARTIVMPVGAGPLELMPQQLTGGAGASIQVVIDGEKWVAGVEPDRLQGWERELHGDYPSTNPYKALFYAALLMSEQKEIDVLVTGLPVSQYMEVERREALKARLEGEHQITPKRSVAVKSVVVVPQPAGAYMDVVSSTKDEDLLEIIQGGKTVVIDPGFFSVDWVALEEGEVRYHSSGTSLKAMSVLLQETDRLIQEDHGGAPGIEKIEKAIRAGKAEIFLYGEKVSIKDYFKKASTKVAQNALIPMRKSMREDGMDADVVLLAGGGAEAYQDAAKELFPKSRIVLPNESVASNARGFWFCG

SEQ ID NO: 394 - protein, 360 aa, Lactobacillus antri DSM 16041
MQYSAKQGEQPMEIFSLDLGNKQTKLKSSKSEYVLPSRYLNQADMPMSVGSSTTNNDLHIYSVPFSDDKYVWGRDIDGLHLDEYLADTIMYGNRYNSEAFKLLANFALGLLASDFKIANNQVLEVVVTAGLPTGDYADQERLRSLLKVLEGQHQVTIDDQIVTVRVRKVYILPQPIGTLYNELLDNQGFIKNKALLDEKVGIVDVGGGTILIDTILNFELSGKNRHQFNTGVNDLYEAIASRIEGDVSLYQLEKELRHGNQQHQWSYRFSKNRQDDITELVGKESDRFTRRLVANVTSTLKNLDSIDTLFFTGGGANLINQKILKTTFTNAAIVKDTEVANVNGFYKYGLSQQVQEKEGK

SEQ ID NO: 395 - protein, 324 aa, Vibrio cholerae Mex1
MFVLGVDIGYSNLKLAIGQSGSEPKTIILPAGAGPADRMPERIGGGDDETCLYVSVDNERWAAGVPAGRLQGWERELHPEYPTTKTYKALFHAALLMAETESIDLVVTGLPVSQFHEPQRKSDLVQRLKGVHQVTPKRSITVHDVRVLPQPAGAYMDLVQTGGDLGLIEEGRVVVIDPGFFSVDWVALEAGEIRYSSSGTSLQAMSVLLETIDKLISEDHGAKVGMDRLEKAMRTSDLQVLLFGEKVDISPYLNAAMKKVAPVALTAMRQSMRDESINADLVLIAGGGAMAYKEAAKEIFSRSKIIVPEQSVLANVRGFWFYGA

SEQ ID NO: 396 - protein, 366 aa, Lactobacillus helveticus DSM 20075
MWYSVYTQNNAIQGECFMDIFSLDLGNKQTKLKSSKAEYVLPSRYLNQADMPMSVGNSTMNNDLHTYSVPFSDDKYVWGRDIDRLHLDEYLADTIMYGARYNSEAFKLLANFALGLLASDFKAAKDQVLEVVVTAGLPTGDYADQGQLKALLKVLEGQHQVTIDDKIVTVRVRKVYILPQPIGTLYNELLDDEGFIQNKNLLDEKVGIVDVGGGTILIDTILNFELSGKNRHQFNTGVNDLYEAIANGINGDTSLYQLEKDLRKGNQQHHWSYRFSKNRQDDITDLVCKEIDRFTRRLVANVTSTLKNLNSIDTLFFTGGGANLLNQKILNTTFTNAVIVKNTEVANVNGFYKYGLSQQAKNEGGK

SEQ ID NO: 397 - protein, 324 aa, Ammonifex degensii KC4
MKVAIDVGYGFVKGVAGSGERVRFPSVVAPAQELVLSDLAGREVGHLVELRRLSGAVERYFVGELALKEGRAQAVTLDRDKHLHPYHSVLLLAAARLLGAGSSAELCVGLPVAYYRPRREELKRHLMGLSAEVSVDGSPAARVSFSRVLVYPQGAGALLTAADLPESGLTVTVDVGFKTTDFVTCEVQDGKALPVSSLCGSLEVGVHTALYLVQAAYQARTGAPLDFTRAERLLREGRTFFRGEELDFSREAEMARLAAARSIADGVLAVLGSRADEVAVYYLAGGGAEALPQLRQMLPGRVRVLPDPTFANALGFLKVLSGSA

SEQ ID NO: 398 - protein, 383 aa, Cylindrospermopsis raciborskii CS-505
MTEPTPAANPINLAAVPMNSGISKQTVSSISLTHKPTSSSGKNILSVDLGRTSTKTCVSREPGTVAFIPANVKHMSTEQIRSGVFESKTADPIIDLWLEYQGSGYAVGQLAADFGANLGVGKSKVEDALVKVLAAVGYFKLQGEISVVLGLPFLSLEQFEKEKAQLVSLLTGPHTVKFRGESLLISITKVWVMPEGYGSLLWTESQPNKSPLVPDLTTISVGIVDIGHQTIDLIMVDNFRFARGLSQSEDFAMSEFYQRVAGEIEGADSQSLALISAVNKPKGERFYRPKGATKPTNLDDFLPNLTEQFSREICSRVLAWLPDRVTDVIITGGGGEFFWADIQRLLKEARINAYLAAPSREANALGQYLYGEAQLSTSRVANQ

SEQ ID NO: 399 - protein, 384 aa, Raphidiopsis brookii D9
MTESTPVANPINLAAVPMNSGISRPTVPSISSAHKPTTTSGKNILSVDLGRTSTKTCITREPGTVVFIPSNVKHMSAEQIRSGVFESKTADPLMDLWLEYQGSGYAAGQLAADFGADLGVGKSKVEDALIKVLAAAGYFKLQEEISVVLGLPFLSLEQFEKEKAQLISLLTGQHIVNFRGESISVSITKVWVMPEGYGSLLWTESQPNKSPLVPDLTKISVGIVDIGHQTIDLIMVDHFRFARGLSQSEDFGMSEFYQRVAGEIEGADSQSLALISAVNKPKGERFYRPKGVTKPTNLDDVLPNLTEQFSREICSRVLAWLPDRVTDVIITGGGGEFFWGDIQRLLKEAKINAYLAAPSREANALGQYLYGEAQLSSSRGVARQ

SEQ ID NO: 400 - protein, 424 aa, Lactococcus lactis subsp. lactis KF147
MNIFAIDLGNKRIKMKSEKGEYSYPSSYLNAEQVATGGLGSESVEQNFVFKIPQDAKNSFIWGPNLEVYNLPERMIDTYARSGRMKQKKAIRILEFALGRLAMDYPEAYESPLVVHLTLGLSITDMHEESDTIDVLKKLAIGQHQILIDGRVLTIIIPTEEFLSIIPQYMGTVLNLAFDEEYQRNQRFSDGKIGVIDIGGGTILINRSVGLNPSPNGDERFEGIQNLIKEIGRRINSTKPFLIEQMLRSADDKGNYNYRPNSNRQDSRDITSVVRGEIERYTRFTVAPLVTENFPDIEEIDFIVVTGGGASLLAKEALKDEIGEEYFERLFFLNESEFANVRGFYKGGYLKWHISNDDSLQIKNSLEKVQTSLTNFEAFQDEKELVIPSNETINTLRSQEVLEAQKKLQALESEIEGIKLEFED

SEQ ID NO: 401 - protein, 325 aa, Bacillus cellulosilyticus DSM 2522
MKEQILIAVDCGKYQTKGIARYRGKTFMVSFRTKMMPVSRLGVDIQPNSFLVEYLGNEYLIGNMVSEDFVDYSLTKNSTIHQISIYTAISQLLQKANAPANVDIRLAVNVPISTYKDSVQKDSFKQMVENRRGSIHLLVNGRTHSFELSDVTLAFEGMGEVYSKPDVYKDKNTIVVDLGGLNTTLCTFSGIQPLVNTMIVSDLGINVLKGRIGKAINERYGLSVSADDLEQVLRSGYFASKGEVFEESKVFIEELKYDHVQQIIRFARSRGYTFNMSDIHFVGGGAIILKRYIKQEFPHAVILDNPQYSNCLSFLKILEVKYAKH

SEQ ID NO: 402 - protein, 372 aa, Arthrospira platensis str. Paraca
MQSNKQPGQSQSQSPLAKATTTKPTTTTVVGRSTILSVDLGRTATKSCISRNPADVVFIPSNVAQLSVEKARGGGFESKNTDPLLDLWLEYQGNGFAVGQLAADFGASLFGVDPAANPSKVNDALIKIFACVGYFNLKGDLDVVLGLPFYSQEQFEREKEQIMSLLSGPNTLVFRGEQVVVDIQSVRVMPEGYGSLIWCEAQGSKDMPNFADLSVAIVDVGHQTTDFLTVDRFRFARGVSQSEVFAMSKFYEEVAAKIEGADAQSLFLLEAVHKPQGQRFYRPRGATKPANLDEIVPELRKIFARDLCDRVVKWLPERVTDVVITGGGGEFFWQDLQPLLKEAQLRAHLTQPARKANSLGQYVYGEAQLAKR

SEQ ID NO: 403 - protein, 318 aa, bacterium S5
MKCIGQDIGFGDVKTVIEDQMLKTPTAIAYEGFGARVDLDGPTSIEFEGQNYLVGEDAIESGQPVFETTSIDFLLRYAPLLAYHAIKAAGFDFDEKIHLGVGLPVSYYTPENKAALANRLNTAVVNKERLQLNTLVYPQGVGAFYDYRLTTNEKISSALIVDIGYNTVDVVHISKGRPNKSGSGMFDRAGISVIIRELSRFISDRHQIQLSNQVIKEIFISKKLSLYGKEISLEEPIRQIVERYTTHLLHSLEDGYHQQLAQAQKIVITGGVAHYLQHYIPTKMQESIVIPESPEFANARGFYKVLIASISDSENVDA

SEQ ID NO: 404 - protein, 398 aa, Bacillus pseudofirmus OF4
MTKSRIAAIDVGNDSVKALFGKADFELNIPNVIARDTEDRPVIGIEELNDKDPLEGIHIRVHSPALNDNNAIYRVGNLATKSDNATELDPGSSKSEEDQTLVMLFATLALDAVRAENGELFKKSNQVIDANYTLGTGLPLREVKEGKDVGYRSQLLSSVHQVEFLVTPKYQGLKVNIRFDQVKVYPEGFAAYINLVMDKDLNIINRDLVDKRILIQDIGGLSTDIAVIKNRNVDDDKAQGFNLGVSESLEAIREEIRTKHGVELDTRRDVVEVITKKQDRNHIMVKGSRTSVHDITDRILFELAKKQYRHLRNVWQKNSQTEICYFVGGGAMVLKEYLKTLNNNLDGYNIAFFEDEKESIWMMANAYYKLIADFDRKNNQVAAAKDPQSHQEKKAAKK

SEQ ID NO: 405 - protein, 399 aa, Bacillus pseudofirmus OF4
MIVMNMNVANDNGNNEQAIKVNDVLYRQPNTYAMPERPSFEDNSEPETLIPNLLNELEVDIQSDSIDFGGLYFIGRKAIKSKYTAHSMSVDSEKKYESDLPIINTLGLLSGVAVQNAYKESKELPKEISLNVDMATALPVNQWSRETASFFSKRFMEGLHTVIVYVGHLKVRVSMKFTYVKVIPEGTPVLFNLIEDQEGNYRNDSIFDEFKKEYEVNVDGEYFQDKRIKHVDIGDGTCDTPLTIGYEYDRDFVNGIPTGIGHSINKAIDLFKKEVSDMNISRQQFIDYVKEEGHPYHDKAVRLIKQSMRSEVKSIHDHIVDELKKASNEVDIICVYGGGSILMKDHLYKPLKKLCDRPDIPAKLLWVPEQFAPLMNVEGLNIFLKAVLPQLKEKELASK

SEQ ID NO: 406 - protein, 362 aa, Xenorhabdus nematophila ATCC 19061
MGNYRGYTGRSQAVFSLQQEENNRKAIKKQSLEDFMNQFVMGLDIGYSNLKMAMGHKGEEARTVVMPVGAGPLELMPQQLTGGAGTCIQVVIDGEKWVAGVEPDRLQGWERELHGDYPSTKPYKALFYAALLMSEQKEIDVLVTGLPVSQYMEAELREALKARLEGEHQITPKRTVTVKSVVVVPQPAGAYMDIVSSTKDDDLLEIIQGGKTVVIDPGFFSVDWVALEEGEVRYHSSGTSLKAMSMLLQETNRLIQEDHGGAPGIEKIEKAIRAGKTEIFLYGEKVSIKDYFKKASAKVAQNALVPMRKSMREDGMDADVVLLAGGGAEAYQDAAKELFPKSRIVLPKESVASNARGFWYCG

SEQ ID NO: 407 - protein, 338 aa, Burkholderia sp. CCGE1003
MKVSAFGVDIGYGHTKVALRTGSEISTASFPSLAPLVPHLELSRTRERVADGLNVVLIEVQGSHYAVGPEVESLPACSSLTRTSLDSFCLTPMYTALLGGALYRAGATEIECMVLGLPARFSWVYFRYLRDAFTGALDFGQGVIHVGSVDVVPPLLGSLGTFANSGDGRFDPEHGHLLIDVGYSETSWLLYCDHKIVPQCSGHVRGGAWQVYRTIGSLIANRERCPVDNMERIGRCLSDKKPLLHYGKDIDLAPLVESSQAVVSAAFEIIRDRTPSPSRLKSIVLTGGGASLYETAIRAAFPRVRIDILDAPSHANAKGFLLLGEAQLAGRKLVPTSA

SEQ ID NO: 408 - protein, 267 aa, Deferribacter desulfuricans SSM1
MRKVISIDIGFGSTKVAFNEGSGLRLEKFPTAIAPIPSSNHFNDNFYQEDKHFYFEGQLYTVGDAAKADAIVTTSYEFLHKYSPLILYYIIEKFNIDYSNAVFALGLPLSYYTNDKINEMSNRLKSFTVNDVEISIDVKILVQGVGCLFDYLSTNQSNVKNGIVVDIGYNTIEFIVIQNGKVKKADSRGLVKKGMNMLIVKLQQEIQSKYALELTEHEAVSALEDESINLYGNKIPLKEDIIKLKKWYTDTVIQNLIGMYDDKNKEI

SEQ ID NO: 409 - protein, 381 aa, Eubacterium rectale M104/1
METSIFATKSEIREHKNPSFGNVHIIGLDMGYSGVKCFHENGNFVFPNYCQKIEGEIFGDLSRNDLIYEDLKSGDRYYVGALAIKSLSEDSTVAEDKILGRNHYGHMDFLIKFRTALGLARWDIPEDEPLFIQTGLPPAYIKTDEMLLRNAIQQSHDFALISCGKRKEFHIDITAEDVDVMYQPMGTFYSVTTDQFGNLTNDLKTFRNSDLLVFDCGFKTLDKFVIQNKKLEEKDTDENLGMKRILEETRNSMQEDLKKKGYSVSVSLPAMQQCLKNGVVRINDRINFTVKEFPIEEYLKKANELICKEAFDSIKDYVFSIKYLIMTGGTGSAWYGYFKDKLKGIHTLKVISGDYNSNLPAFYANARGYYMYRLTQFKVKR

SEQ ID NO: 410 - DNA, 1176 bp, pLS20 Bacillus subtilis
atgaatatttctcgtatgaacgtggactttggaaacagtatgtacatgaatttaattgatggttatttttttgaattgcctacaaatgtagtagagatatctaaagaagctgctgaaggaaaatttacgagtatcgttgaagatccggcagatttaaaggaccggttattagtttctacagttattgatgaaacagagagatattttctagttggtgaacttgctgaaccagaagtgttaggcaaccaacacatcaagaagttacataataaagtagagtcacatattccatacgtaacatttttagctgcaactgcttattaccaagcgctaaaaggcaaacgtgaagataatgaagttactattgaatactttcaaacaatgctaccaatttggcttcttaaaaaattggataagttcagtgaaatgcagaaaaggatggcatctaaatttttgggcactcaccaagtaaaggtgctgacattaggattagaaaaagagcttactataaaagtggaagatgcagcgtgcaggatcgaatctgaagtagcaagatgggcaataaagaaaaactttgacctagaagataaagactatgccgaacaatttaaaaattatgacgtagttttttgtgatttaggtggcggaacagatgatctagtattactaccagctggattaaaaccgccaaaaagtcgtgattcttttgtttctaataccgaagcaccgtttttagcgcacttagaaaaattgagaaaagaaaaactcctagagcactttgatagcgttagggagcttgaaaagtttatatactcaaatattggaaaaactaagatggaacgaagagacgggaataccggtcagaaatttgatttaactgatatcatcaaaaaatctcttaaagaatacacagaaatcaaaatagcccaagctgaaaatacgttccctgcaccaaaagataaggtttacaaatacctttattttggcggtgttggcgaggtgcttgaagaatcaattagtgtggttactgaagagagatatggccgtgatatttctgaatcaaatcatatagttgctgaggatgcaagactgctcaacttatatggccttgaagttttaagccgcgctgaacaagtaaagaaacaggcaaatgaaaaagaggcacaatcaatttag

SEQ ID NO: 411 - protein, 134 aa, pLS20 Bacillus subtilis
MGKNKRIPLFNVRTTQMSDEMYDFVLEQISTFSKGKSKGTFREYAFQLIERDMQQQKEEQQNREKDRHVHDELIAMREEMKKEFRDLRKKIDQGSIYVEHKTADPKSASETIEEGQLITEKITGTIEEEYDYDF

SEQ ID NO: 412 - protein, 36 aa, Homo sapien
LVVDNGSGMCKVAIQAVLSTGIVMDSGDGVTHTVPI

SEQ ID NO: 413 - protein, 35 aa, B. subtilis
LGIDLGTANTLPIEEPFAGSMVVDIGGGTTEVAII

SEQ ID NO: 414 - protein, 36 aa, B. subtilis
VSLDLGTSNTKICLQPLAAGVALIDIGGGSTTIAVF

SEQ ID NO: 415 - protein, 36 aa, E. coli
VFIDDGSTNIKVMPESIPASLLIIDLGGTTLDISQV

SEQ ID NO: 416 - protein, 36 aa, M. magnetospirullum
LGIDLGTSHTAVVSEPFMVNTIIVDIGAGTTDICAL

SEQ ID NO: 417 - protein, 36 aa, B. subtilis natto
TVIDIGNFSTKMAAEGLGANCVIVDAGSKTLNVLYL

SEQ ID NO: 418 - protein, 36 aa, B. subtilis natto
FGCDIGFKQFKVVPQGAGDKTVIVNIGYRTTEIVTM

SEQ ID NO: 419 - protein, 36 aa, B. subtilis natto
MNVDFGNSMYMCRIESEVADVVFCDLGGGTDDLVLL

SEQ ID NO: 420 - protein, 36 aa, B. subtilis natto
VGLDIGYSNVKVLSQGVGINILVIDPGYYSMDYVTF

What is claimed is:

1. An isolated plasmid expression vector comprising a polynucleotide encoding a prokaryote-derived actin like protein (ALP) having at least 90% identity to a polypeptide sequence selected from the group consisting of SEQ ID NOs: 1-409, wherein the vector encodes a stability system.

2. The vector of claim 1, wherein the ALP has at least 90% identity to a polypeptide sequence selected from the group consisting of SEQ ID NOs: 1-14, wherein the vector encodes an ALP7 stability system.

3. A vector according to any of the preceding claims, wherein the ALP comprises:
D at the residue corresponding to human beta actin residue 11,
G at the residue corresponding to human beta actin residue 13,
E or Q at the residue corresponding to human beta actin residue 137,
D at the residue corresponding to human beta actin residue 154, and
G at the residue corresponding to human beta actin residue 156, when optimally aligned with the polypeptide sequence human beta actin.

4. A vector according to any of the preceding claims, wherein the ALP has at least 90% identity to the polypeptide sequence of SEQ ID NO:1.

5. A vector according to any of the preceding claims, further comprising a polynucleotide encoding a polypeptide sequence having at least 90% identity to SEQ ID NO:411.

6. A vector according to any of the preceding claims, further comprising a polynucleotide sequence that encodes a heterologous polypeptide.

7. The vector of claim 6, wherein the heterologous polypeptide is comK.

8. The vector of claim 7, further comprising a mobilization region.

9. An isolated bacteria comprising the plasmid expression vector according to any one of the preceding claims.

10. The bacteria of claim 9, wherein the bacteria is a Bacillus or Escherichia strain.

11. A method for stable expression of a heterologous polypeptide, comprising:
introducing the vector of claim 6 into a bacterial cell, thereby stably expressing the heterologous polypeptide.

12. The method of claim 11, wherein the vector is maintained for at least 5 generations.

13. A method for rendering bacteria competent, comprising
introducing the vector of claim 7 or 8 into a bacterial cell, thereby rendering the bacteria competent.
